United States Patent Application Publication US 2007/0054278 A1 - sequence listing, part 57

SEQ ID NO: 95240 - DNA, 31364 bp, Homo sapiens
cacatatcggtgttagcagtgttccgcgagtggtgcctgagagcagaggagaaacaatacccttgccttcatccaaaatatgtatggaaattactggtcaagtacttcattgatggttccatctaataatgatatggttccgtaaacatttagaaggtttttagatatctagaataggcaaatagacagaaaggagatcactggttgcctggagtcaggggcaaggagaacaggcagtggctgctaatgagtgcagggtttcctctcaggtgatgaaaatattctaaaattgactgtaggaattagctgggcgcagtggctcacgtctgtaatctcagcactttgggaggccaaggcgggcggatcacccgaggccaggagttcaagaccagcctgaccaacatggagaagcctcgtctctactaaaaatacaaaattagccgggtgtggtggcagacgcctgtaatcccagctacttgggaggctgaggcaggagaatcacttgaacccgggaggcagaggttgcagtgagctgagatcacaacattgcactcttgcctgggcaacaagagcgaaactccgtctcaaaaaaaaaaaaaaattgactgtaggaatggttgtacaactctgtgaatatactaatttttaaaaccccattgaattgtacactctacatgggtgaactgaatagtatgccaattatagtgcaataaaactgctaagaagggcatttagaaacaaccgcaacgctagaacaccagaatcccttttttttttgtcagggtctcgctctgtcacccaggctggagtgcagtggcgtgatcacagctctctgcaacctccgtctcctgggctcaagcaattcacctgcttcgatctcctgagtaggggggaccacaggttagccaccacacctcgttaattttttcgtatttgttgttgagatggagtctcgccatgttgcccaggctggtatgaagtcctgggctcaagtgatccacctgcctcagcctcctaaagtgtgggggtaacaggtgtgggccactgcacccggccccctgctaattttgaacaaatttttttgtaggaacaaagtctcactttattgcccaggatggtcttgaactcctggctttaagcgatcctcctgccttggcctcccaaagtgctgagcatataggcgtgagccactgtgccacgcttcttttttttttaaataaattagttgagtttggccctttgtaaatatgtaccaatggaatatatgagctattattaaaaccagatactgttacttctcctttgctatgactaactttttatttctgcagtatatgttgctctttggtttaggggactaacaactttttaaaaaaataaaatgttatctgtgtcttgcagggctgttacagggggttacgagcaaaatggcacctggccgggagggaggtgggggctgaaccagccccaattcaaccaggaaggggcatcttagtgttcacaccaaaaccaccttcaactggttgtgagctaggggtgctgctatggccagtgggggaggcctttaattctaagtcttacgttctgagtgtgcctctttctaattcaaaggtacaatataaatagactgtgtgacctgcatgaaaacattcctgtttgcaatggcacatctcacagaaagttaccatttttcaaaccacctataatgagaatggatgtcaaaatgggattctaacattttgtaagaccctaaatttatcaaataaagagtcaaatatgtgcaatgaactcttcctgagacaggaagaaggggcactttttagaaagatattcaacagaagggttttctagttgactgactatcaaggtagagaaaaccctataactccattcattaaaatatgactattaataccttactaaatatccttctacatccttacccacgtttttatacacatgcttttaacacgtgttttaaataacaaaaatgagattccactaaatcaactattttaacctgtcccactcactcccctctttattatactttttgtgtcaagttgatttatttattgaataaataaaatccagacttttctgtttaagtgcctgaatttgttcttacacaaagcaagtgctctcaagaagctcattcttgaagatggttgagaaatatcaatgaccaatatcaaaagaacattaacccatgaaatgtacatgaatatggccacgcgtggtggctcacgcttgtaatcccagtactttgggaggctgaggtgggtggatcacctgaggtcaggagttcaagaccagcctgaccaacatggtgaaaccccatctctactaaaaatacaaaacttagccaggcatggtggtgtatgcatgtagtcccagctacttgggaggctgaggtaggagaacagcttgaactcagaggcgggggtggaggtcgcagtgatccaagaccgtaccactgcattccagcctgggcgacagagtgagactctgtctcaaacaatgacaagaacaacaaaaatttacatgaatatgcatatcagctgaaggcaagcacattacaaatgtaagtacaatttagtagaaggggtgagggagcctgggtgtcaatggggaagccttggtgagctcctagaagtaggatgaaggctgtgagacagtctcagtcctggtgatacagtcaggatgatgtaacagggttcagtgagggagtgcaaggtgacagaacaatatggagtatcttatactaattcctgcaaacttctcaactatgtacaagaaaacaaatacttacgaaacagaagaaaatggccaggtatagtggctcatacctgtaatcccagcactctgggagaccgaagcagtatcacctgaggtcaggagttcgagaccagcctggccaacatggtgaaaccctatctctactaaaaatacaaaaattagccgggcatggtggtgggcgcctgtaatcccatctactcgggaggctggggcagaagaaccgcttgaacctagggtggggtggaggttgcagtgagctgagatcgagccattgcactccaacctgggcactaagagtgagactccatctcaaatttaaaaaaaagaaaaaaaaagaaatagaacaaaacacagcagtggatacagtgctttttggttcattcaaagcagtcccatcagagtagcatattaaactatacaaacggctccaaatggcaaaatctagacagtagaaaatcccaggtcctaattatgttgtcaaataacttacaaaaaaaaaaaaaagatgaaggaagaagctacagattaaaagagatttaacagatttatcaaacaaataaaaaaggacttttggaacctaattcaaataaagttaaaatacatatgacatttacaagaaaactggaaaatctggacagtagatatttgatatcaagaaattcctaattttttagatgtggtaatagtattgggttatgctttttaaaagtccttatccattagagatgcatatagaattatgggtgaaataatatgatgtacagaatttctttcaaaataacatgggaagggcggccaggtatggtagatcatgactgtaatcccagaactttgggaggctgacatgggaggatcgctggtgtcaaggagttcgagaacagcctgggcaacatagggagactgtctttactttaaaacacacacacacacacacacacacacacacacacacacacacaaacacacacacacatacaataaaaaataataatatgagaaaggagaagtggataacgaaagcacagacaaaagaagactgggcttgagctaaatcactgtggaagctgtgtgatgaggacaaggggtttcaacagattattctgtttttgcatatagttgaaatccttcataataaaagttaaacaaaaaagtgctacaaatcctaacgctgacactaaattctacagcatgaagaatttatggaagagtgagactctgtcaaaaaaaagaaaaggttgtggaaaattacctaatgatacaaaaagtataataaagggggtgagtgggacaggttaaaatagatgatttagtggaatctcatttttgttacttaaaaaaagcatgtatcatgtatataaaagcatgggtaaggatgtagaaagatacttagtaaggtgttaacagtcatcttttaatgaatggagttataggcttttctctaccttctttattacgtttaagaatttaatgataaaaagtcacgcatgttgtttcaccccagcagtgttggctttactaaaaacacatactctaagaatcccatacatgaaaggtggaacttaatcaagaacatgtcagagagaagctgcttgagcaagaaaatatctgaaaagcaagctctcctagaagagaagcaaggcctccttaacagtttataagcacacacctgttaggggcacatactgcctgccagtgcctttcactctaagtctctctgtaagctgtaaaagcaaacagtttaatggcaaatacatactctatccaggttaaggtgccacagatttataaacgtgtaaaaacaccagaccttgttttggggttaaggtgagaaaagggcttgctaaacagtctctttcctagaaggaagttctcttacccactcactccctgggacagaaggtcaaagagcatctctggttggaatcataatgcttcggcctgaagtgaccaggccactcactactttagttgcccaagcagtatcaaaggagctcacctcatagtctttccttggaagaatctcatcctcctcctcctgtgtttctccaaggatggtctagaaamacagatccgcagagggagccttttttagtggttaggagtggaaggaggcagaagtatttactgaaatcagtggctagcttctaaatcatctggagccattatcaaataggaaccagccctcaaaaaaaacctttcaggggtgagggaccatgtgggtgaggatctacagccatcagctgagctcttcatttccactgatagtctccaaataaccaccctcctcttcaggacacctcaaagatgtccaacgccagctgaaaaggggggtaaaaatgcaggttccatttgacagtgtgacgtatctgaaatcagaaaggacttgtcaactctgggaacacaactcaagttttcccaggatgctttgcagggggaagctggactgtcagtgacccagaaagggtgagggatagagtgagaaaggactggagaagctaaaacagcagcatgataagcacaaagtcctgtgaggaagctcattctgaaaacgcttgtttcattccaaactcttttcagatggaaataaaaggaaacatgggtgggatttactggagctggcctggattctccctcagattccaggaggggttatgagaaaagaccccagacttaggcacgtgaagcagggtagacgcttcgagagccctggctgcggtccccaggccccacccgctgccacctgcgggcccagattggcccggccccacccccggcaacgcctctctcagtccyttagcaaccgccccctccccaggccgactccgccggcttcttaccagctcctcgggggtgcgggtctcacgctcaccgcagcagcagcaccacctgcagcagcagcacagagaccccctgcaccccgccatcttcctcctttactgccactctggacccctctaccaaccccctcccagccaggatctgcgcctcacgtgactggccccgggacggtcacgtggccctctcgagctctgggactgagaccaggagtggctgcagacgggtggggcgaggactcgcgtcacatgacgataaaggcacggcctccaacgagacctgtgggcacggccatgttgggggcggggcttccggtcacccgcgccggtggtttccgccctgtaggcccgcctctccagcaacctgacacctgcgccgcgccccttcactgcgttccccgcccctgcagcggccacagtggtgcggccggcggccgagcgttctgagtcacccgggactggagggtgagtgacggcgaggccggggtcgccgggagggagatcctggagccggcaaacaacctcccgggggcaaggacgtgcttgtgggcggggagcgctggaggccggcctgcctctcttcttggggggggctgccgcctcccttgcgcacccttcgcgggattagtgtaactcccaatggctaccacttccagcgaccgccaaccctcaagcgaagactgactttggctccctgcctggacggaggggcccctgagccaggggtgacgatcccgcccctctgaccggcccaggcccgtgtcctcgcccccatcggtgactcagtgacctggtgactggattctcggccacctgggcgccgagacggcttccggctcctgccttttaaacctgcctccccggcgakcacctggagaagagcgctgggcccggggcactgcggtccctggcgcccactgcgtcccgctgcgcacgggggtccgccgggacctttctgggagtcgtaggcttagtatcccagtgcttggcgcagactagttgttcagtaagtggcagaggcttattttgagagagtggcagcacctggccctttggcgctcagtgaatgttggctatcaccgtgtgccaaactctggggataccccaggcaggacaccggtcctgtctcagggaactggggaaagagaaaggagacaggycttttcacccacagttacaacccagggtgctatgggagtccagctgataacggataaatcgtgggagttggcttacaaatatggcacatgcgtggcatatactaggaatgcaataagtctttgaaaatcagagggtttacaggtggttcagcttcctcctactctaggttctgttccagcaagcaattaacgaggtgcgcccttaaacgctggaggaaagccaactggctgctcttgctgttactcctcccccccgcccccgttcctcactccccacagccatccccactgagaatctggagtttgaggtcagaatgaaagagagcagccctagagggagaaagctttggcccagggttcttagtctggaatcaactccttgtctttggatgtatccccgtgtagtctgtgcacctgtgtgtgtatttcaggggaagggagcagtgcatttaatcagattgtcaaaagagtctaagaccccaaatggttaggtacacagggttagtggtggacagtctgaaagaaatgaacctcacctgggctttcctctgttgtgccatgtcaccacacacccattcactactgtgtgtttgcccattgctgtgcaagtgttttgtttgtttttaagtgtttgtcttattttcttaaccagactgccagatgrccctatgccctctgttggcctgtctgtgccctggtggctctgattacttgtttctgttttttgtttttgttttttttttttgagatggagttttgcttttgtcgcccaggctggagtgctatggcacaatcttggttcactgcaacctctgccttccgggttcaagcgattctcctgcctcagcctccagagtagctgggattacaggygcccgccaccaaacctggctaatttttatatttttagtagagtcgggatttcaccatgttggccaggctggtctcaaactcctggcctcaggtgatccacccacctcggcctcccaaagtgctgggattacaggtgtgttttttgtttttttaagagatggagtctcgctatgttgcccaggctggccttgaactcctgggctcaggcawtccttctgcctcagccttcccagtagctgggtcactgtgatgatttgaattgaattctgtgatgtgtaagaagagcagcctgcaaggcaagcacagatggggcagcttttgttctgagaaattcgtgcccttactgaacttgggtctggctatttttggaacatggccagcatcaagttctaacccacaacackgtctttttggagtagcatgaattcaggagaaatctggctgcatagtcaagccctcaccccttccatcctrtgcacgaactgtttcaagtaacagatgttccaggcagagccagccagagtgagctgttccttctctggagggtgatctggtatccctgaacgcctgttggcctcatctccaccaacccctgcagtctctgcccctgagtccccctccttccatccgcctccccttactagagcctcagccctccctcctcgcctggaagccttgcccccgcccccttgtgctggctggagctcaagcctcttcctttgtcgcagctccgcccagttgaacacacccgctggggaaggtgcctctgttccctccccacgcactctgggcctgagctgacagagatggaccatcgaaaagccagggtcctcccagctgggcactactgcccctcgctaggaatatgggcctcgcaggtcggcagcgtgaggtcctctgtgccaccttccatcaggtagctgtcaccgaggagcatgttgcagtgccgggtgggggctgccttgcatgcaaggagcctggcagcagcggagggcaaggctttgagtgaggcggcccggacagccatagctgaggagcatggagccactgggagggggcagtgtcaccttttttggccttcttcctgtgtggaaatacagygcctccggcttgaacctgccactcaggtgtcttgatgtgtcgggggtgtggctgcctgccccctgatgctccctgccccaccctgtgcagtaggaacccagccatggtgaacgaagccwgaggaaacagcagcctcaacccctgcttggagggcagtgccagcagtggcagtgagagctccaaagatagttcgagatgttccaccccgggcctggacccygagcggcatgagagactccgggagaagatgaggcsgcrattggaatctggtgacaagtggttctccctggaattcttccctcctcraactgctgagggagctgtcaatctcatctcaaggtraactcatgcaaggttaaggtgggaggcgggagtggtggtgcctggggagcaaactgtcagccctgaggctgggctgccctttaacccggcagaaaaaagcagccggagggggcaggaaggagaaggcagagtgggtcatctgatctgcaacttctctgttgcctgtaaaagtccctccacagtgtcaaggtattttagacacactcttcaatgggttaaaaatgttgattctcacactgtattctttgagggaacttgggggctggatcacgagtgcagtttaggaagtcacaaagcagtgagattgttttcagcaagttagaaatttggattatgcttcttgaactctagaaatgccaactgaattacattagcacttcatgaattgcagttttttttttaagtttatgccttttactgtatgcacgtctcacgtgtcactcccaagtttttgaagtttaaatgcacaaggatgtttaaatacaccgttgatagcttgtaacacaagtactcgtgcacatccaggcttttttttgagtctcgtttcggaacttggccttggtctgcataactgtaagctgctgcacagggcttggggggtggcatgaaagaaagtgagtctgctgaccctctttctaactgttcctacagcgaggctgtgcttgccacagttaggattcccctaactctcaatcatgatgtcttaactcacctgagatartaaacaggcaagcgctgtgaaaagtctgaagtgctgctctcacacaaaatgatagcgctgttgttgtgtcttacctctgtaatagtgattataacggcacctcacatatactgagtattcggtttgtacaccaggcactgttctaagttctgtggaaccagctgccgtcatattctcctagtgttatggttttttgttgttgttgttgctttttttttttgagacagagtctcattctgtggcccaggctggagtgcagtggtgtgatcttggctcattgcaacctctgcctcctggctcaagcaattctcctgcctcagcctctcaagtagctgggattacaggtgcccaccaccacacccagctaatttttgtatttttagtagagatgaggtttcactatgttggccaggcggtctggaactcctgacctcaagtgatccactcacttcagcctcctgaagtgctgggattacaggcgtgagccaccacgcccagcatcctagtgttattatgaagtgggtactactatctgccgtgtcttataaataaggaaacagaactcacagagattaagtaatgtacccaagatcacacagctataagtagcaaagccaggatatgaacgctgattggtctgtctccaaccttcattgatgcttctctaactcccgggccccatgggaaggcagtgacggatggtatttctcctggaacctctcttcagaaacaaaccccctacaggtttgaccggatggcagcaggtggccccctctacatagacgtgacctggcacccagcaggtgaccctggctcagacaaggagacctcctccatgatgatcgccagcacmrccgtgaactactgtggcctggagaccatcctgcacatgacctgctgccgtcagcgcctggaggagatcacrggccatctgcacaaagctaagcagctgggcctgaagaacatcatggcgctgcrgggaggtgtggagccagcactcccctacactctgggttctggctttcccggaggccacttggtagcctgaacttggttcctgaaatggtcctttacttcytcctgggccccacgctgaggatccgcaggatcccatccccgccagtagtgtcagtaggcattgtgggtagtgagtcatcctgggcaccacacacaggcagccacctcttccacctcttgacctcgacataggagttccgtcaggaatgcagtcgcggcctgataaccctctgccttgcctacaccactgcatcgattgctggctgcacccagcacttggcccaatcacagagtaacagagtatccaggagtgagaatagccggtcaggcctctggtgcccgctgttgtcaggccacctaagagtgggaagagggagcctgatgggtgggatcctatggcctcgtgctccctaccacaagaccccttcacttgagatgagtagaaaattctcccaggaggcaggagccccaaggccgtgggatgggagagggtggcaggcgtgcccaggtagaagtagggaagggctctccaatcctccaggcacggtgagaagcagcggtggtctcctattctccaccgccagcacagggtcagcatgcagtgaatattgaactggtgggctgcttttttccctcctgctgtcttaccaagtgctagaaagagacgaaccaaacctaaataatatgaagtttctgccttccagggactcgcrgtcctsggtgtcrggrctaggtagagggaacagaaagggtctctggaggttgggtgagacccagtgactatgacctccaccaaccctgcagacccaataggtgaccagtgggaagaggaggagggaggcttcaactacgcagtggacctggtgaagcacatcygaagtgagtttggtgactactttgacatctgtgtggcaggtgagtggctggatcatcctggtggcggggatggagctagggaggctgagatgcccagagagcctgtcggtgttcggttcaggacacagtgatcaggggcactcatgggtccatgctggatgaaggacatgcagaggtgaactgcaccgtgtccttgctccttttgtatcacccactcccctcctgggcctgccaccatcgacccctagctttttgttcctctgcctggctgtgcccttagcctgcttggccttattcttttctttaaaacgaaagaggggtctgggcgcggtggctcacacctgtaaccccaacactttgggaggccgaggcaggcagatcacctgaggtcaggagttcgagacctgcctggccaacatagcgaaaccccgtctctactaaaaatacaaaaattagccaggtgtggtggtgcacggctgtagtcccagctactcaggaggctgagccaggagaatctcttggacccaagaggcggaggttgcagtgagccgagatggtgccgctgcagtccagcctcagtggcagagcaagactccatctcaaaaaaaaaaaaaaaacaacaccccacaaaagagggatatttactaacaggattccagagggcagggaacccaagatcaggagatggcctcagacctcacaaggcactggaagaggtcaaaaagcaaggccctccctcattccctctggggccacagggtcccccatctccgcttcccactgcacatctgtgcttcatctgggagacctgatacccatgcttttccacacacctggcctgctcctgagtgtgcagagtgtcagttccagccagttccccaggctaatggacaggcctccgttccaaattcccaggaaagagaatcaccattggccacagccacaagaccaggttcccccaacagaaatgggtgggttggacttctctcccacccttgaagctgaaggctggcattgagccctcagcgtctcagacagcgctcaggtatggcaagacagtgtgcaccagggacaggaagtcccgggattggcacattttctgggatgacagtttttttgccaatattctgggagaaatcctaccatttttatattaaacatggctatgttatggagtagcatctaaagtgatatgaactaaaaaaaaaaggccaggtgcggtggctgaagcctataatcccagcactttgggaggccaaggcgggtggatcatgagatcaggagtttgagaccatcctgtccaacatagtgaaaccccgtctctactaaaaatacaaaaattagccgggcatggtggcgcgtgcctgtagtcccagctacttggtaggctgaggcaggagaatcgcttgaacccaggaggcggagcttgcagtgagccgagatcgcaccaatgcactgtagcctgggcaacagagccagactccgtctcaaaaaaaacaaaacaaaaaacccaaaaaacaaaccacgtggcttcaagaaaattacatgttgtgagtaactttggccttgtccctaacccccgatggacatgtccattctgtcaacaggggtgtttaggtgctaagtctgggaagcgctgattaggagtcagagaacagacatttccaactgttaaattgtcatcgcttgtatcagccattatatagtcagttactgggggaatatgcacccgtgatgggcgttaggtgataatgattggaaactagtgaagctgtgagctcacagttgctgaatggtttcttactttgcttatcaagtgggtaatgaagatgagtggattagaaaacaccaacctgttgggcatggtagctcatgcctgtaatcccagagctttgggagactgaggcaggagatcaagaccagcctgggcaacacagtgagaccgtgtctctacaaaaaataaaaacattttaaaaaagaaagccctcagctgttcatgatagaaaaatagagtaaatagcaaaatctatacgtaatcaaatgctagatttgttcggtgatatttaggtattgtagctatacttttcagctattaaaaagccttgttgtttctgaaattcctactgggaaaatagctttgttattgcaagtgtgaagccccattgctttatcccccactcccttaccccttgaaacaatagtttttatattcattttttgatgactctgggtttcttaagaacggaactgccttatcagagcaaagcagcttggccttccgcctggctcagagtcctgccctgggcttgggctgatgaaaccagcactccatgtagtttcatgaaggcctatggtcrtcctgcttgcctgaccgagcaaggcggctagtaagtttagtcattgaggaaaggggtcagagagttcacagagccagtaaggagcctatgggacatctgatcccacctcctaagcaattctggaatcttgtcttcagcatccactgcccctgtgttttcagactccaggagctcattgttttgtgagtggcttatagtactctagccagctctctgaaccggatgctggttctgccattrgaaacaacacagaatatgactaataaagaacttcactagggggctgggtacagtggctcatgcctgtaatctcagcactttgggaggccaaggtgggaggattgcttgagcccagaagttccagacaaacctggacaagatagcaagaccccatctctaaaaaataaataattaattaaaaaaaawttttttaattagccagatgtggtggcttgcatctgtagtccaagctactcaggagactgaagtgggagatcacttgtgcccgggagttcaaggctacagtgagccatgattgtaccactgcactctagcctgggtgacagagcgagaccctgtctctgaaacaaaacaaaacaaactcacctatggtggatcctttttccccaggacagacctttggacatttgaaaggagtttctgtattcttttcattcttttttttttttttttttgagacggagtttcactctcgttgcccaggctagagtgcaatggtacgatctcggctcactgcaacctctgtctcgtgggttcaagcaattttcctgactcagcctcctgagtagctattacaggcatacaccaccacacctggctaatttttgtatttttggtagagacggggttttaccatgttggccaggctggtctcgaactcctgacctcaggtcatcctcctgccttggcctcccaaagtgctgggattacagacatgagccaccgcaccctgccatccattattttctttgaagaaaacatcactttcttcagttcttccttgtgtaacttggtttttagcttttcactatcttggacccctgagtaatttcagtgttacattaaaaacaatgtttaatccggtgcctagagaaaagtcaagcttagtaccccagatgctgcccagccagtgctaactgtagcattttctcttttctatggccaccaagtgcaggcctgatttgcttggctgctcaaggcaggacagtgtgggagtttggagcaatccacccccactcttggaactgggctctgagccacctcccctgagagtcatctctggggtcagaagcatatcagtcatgagcccagccactcactgttttagttcaggctgtgctgtgctgttggaaggtgcaagatcagagcccccaaagcagaggactctctctgcccagtccctgtggtctcttcatccctcgccttgaacaggtggaggccagcctctcctgactgtcatccctattggcaggttaccccaaaggccaccccgaagcagggagctttgaggctgacctgaagcacttgaaggagaaggtgtctgcgggagycgatttcatcaycaygcagcttttctttgaggctgacacattyttccgctttgtgaaggcatgcaccgacatgggcatcacttgccccatcgtccccgggatctttcccatccaggtgaggggcccaggagagcccataagctccctccaccccactctcaccgcaccgtcctcgcacaggctgggggctctgggtggagtgctgagttcgctgagttcttcccagatctcctctcaggtccagaacttgcacagcgttgcttggccaccccattttggttacctctaattttccccccaaaacccagcaacagtgtctgttgaggggtttgttgtactttggccaacaagcatcaccaaaagggattctaattctcattacaaatcctgcttaaatcagtgtttcccaaaggtggctgtcatcagaaccacttgataagctttttcaaaaagtggatctccaggtcccacccctggaggttctcactcagtaaatctgagggaggtccttggaatgtgtgttttacttcttgagcttggcaggtgattcggatgatcagtgcagcatgggaacagctgggttagatgacaccatgttaccaacagacacatctagggctaaaaggctggctcaacccaaggctggaatgcttagggcagctgctctactctgtaaaaagtgggaaagctgggcatagtggcacgtgcctgtagtcccggctacttgagaagctgaggcaggaggatggcttgagccctggcgtttgagagcagtgagactcagtctctaaaaacagaaaaaagaggagaaaacggcaggccaagcccaggtgtgctcctagaatatgatcggactttcgtgggtccctctgcctgacactgtggttggcatggatgatggaagggggagaagtatttagggtgggagacrggctggccagcagccgccacagcccctcatgtcttggacagggctaccactcccttcggcagcttgtgaagctgtccaagctggaggtgccacaggagatcaaggacgtgattgagccaatcaaagacaacgatgctgccatccgcaactatggcatcgagctggccgtgagcctgtgccaggagcttctggccagtggcttggtgccaggcctccacttctacacccycarcygcgagatggctaccacagaggtgctgaagcgcctggggatgtggactgaggaccccaggtgagggcagtggcccagagatccccagaggagggtccaagagcagccccggctgcagtgctggctccccacggtggtacagrtggatgtctgtgccatggctagctgggcacatcraaggctccagtctcagagggcatcagatggaagaactcagcctcaggggtgctcccctgcttccggctccctctagccaatcccttgtctcaattctctgtccccatcctcrcccaggcgtcccctaccctgggctctcagygcccaccccaagygcygagaggaagatgtacgtcccatcttctgggcctccagaccaaagagttasatctaccgtacccaggagtgggacgagttccctaacgrccgctggtgagggcctgcagaccttccttgcaaatayatctttgttcttgggagcgggagggcagaagaagtttgcatgcttgtggttgacctgggaggagtcaggggcagaatttacaggaatggcctcctgggcatgtggtggcactgccctctgtcaggagtgtgccctgacctctgggcacccctctgccaggggcaattcctcttcccctgcctttggggagctgaaggactactacctcttctacctgaagagcaagtcccccaaggaggagctgctgaagatgtggggggakgagctgaccagtgaagmaagtgtctttgaagtcttygttctttacctctcgggagaaccaaaccggaatggtcacaaagtgagtgatgctggagtggrgaccctggttcatcccctgcccctggcctgaccccagctgcaggccaggctgcggggctgtgacttccccatcctgtgccctcccctccatgctgtggacatggcaaagggagaagggtaagttgggagacctccacctggaagggcttagggaggcaaagacaggctgggtctttgttgggggccgtgagagggactcagggtgccaaacctgatggtcgccccagccagctcaccgtctctcccaggtgacttgcctgccctggaacgatgagcccctggcggctgagaccagcctgctgaaggaggagctgctgcgggtgaaccgccagggcatcctcaccatcaactcacagcccaacatcaacgggaagccrtcctccgaccccatcgtgggctggggccccagcgggggctatgtcttccagaaggtgtggtagggaggcacggggtgcccccctctcttgaccggcacccgtkggttccccagagcttagggcagagcagcctgcctctcctgggctcttaaattttgaatgagcatggattggagcggatgggagctcatgctttaagtcagatagacctggctgggcacggaacccggccagcactttgggaggccaaggcgggtggatcacttgagcccaggagttcgagaccagcctgggcaacatggtgaaacccattctctacaaaaaatacaaaaatgaccgaggcatggtggtgtacacctgtagtcccaggtacttagggggctggggtgagaggatcgcttgagtccgagaggttgaggctccagtaagccatatttgtgcctctgcactccagcctggcccacaaagtgagaccctgtctcaaaaaaaaaaaaaaaagattggctgggcttggtggctcatgcctgtaatcccagcactttaggaggccaaggtgggcagatcacaaggtcaggagttcgagaccagcctgacaaacatgatgaaaccccatctctactaaaaatacaacaattagccgggtgtggtggcgggcacctgtagttgcagctacttgggaggctgaggcaggagaatcgcttgaacccgggagacggaggttgcagtgagctgagatcatgccactgcactccagcctgggcaacagagcaagactccatctcaaaaaaaaaaaaaaaaaagatagaaatcagacctatggaggcaggtcactcgacctctctgagcctggttttctcgtctgtaaaatgggatgtagcttgtgttctgggcatgaaacctaacaaagcatgtaacgtgcttggcacatggtaagagcaggaagcactccctgaaaggcagctgctgttactatcctgagttgacacctttctcccagggctgctggagttaacattatgttctgatctaaggcccacrggccctggagcagaaagacctgagtttaaggaccagctctactgtttactgtcagagtagccaacgtgctcaacttccctgaacccactttcctcacgtggggctcactgtgcccagcctcccgtattatcagcattctagcaaatgagtttgagtaaacccagcttaatccctgataggcactggttctagaggagatgtcaatgtcattgtcagcttgcactggggaggatggaatgtgtggggcctctctcccatgactcggcctgtcaaaccagttgctgctgttcagaaatggcttcttcgtggagtcttccctgactgattgggagaggggtggctgatagccctcagacctgtccagactgagaaactcacgtccccactcccctcaccctttgcttatggacgtgccaacgccacagttcattattccgcccacatkgctgccartagtcctgataccttaggtgtctgcgaaagggcgtctggcagggctggggttggtgacaggcacctgtctctcccacaggcctacttagagtttttcacttcccgcgagacagcggaagcacttctgcaagtgctgaagaagtacgagctccgggttaattaccaccttgtcaatgtgaaggtaggccaggccccagggttcccacagagtaycargcccttcgttgagcaaacacccagcacctagcctgggctaggcattgtgcaagacagasagatacaggcagaactggggccctgctcttaaggagctcccagcctagagtgagggaggcagatcaatgtgtgaccaccagccagtgtaagtgggaaaatcaagttcaggagaggatgctgtcrggtccaraggagggatatctcacctgggaggccagggaaggcttctcagagggtcatctgtgggaatcactgaggasaaagaggagttggccaacaggagagaagggtattcctgggacagggcagaggacaggcagaggcagtgagctgcaccatctggggaaacsgggaacatgagcaggaggaggcgggagtgttaagcaggggccaggcccgcagagatcatggttgtcctgctggaatttgagttttccctcaatgcaagggaagcctttctccagcagtggggtggcttggttcctgctttattttaggcaaatcacagtggatagtcatacggatgagagagattggggacggctagagccggggaggccagtgaagagacccctggagtgacccaagccaaacacactcctggaggtgggctagacaagagggaatggatcagagagtgagcagggggtgctcaaggaggagaggggaagtggccaggacgcctctaggttcaggcttgtgtggggagagatatcattcacagatgcaggcagaggaggccaggagcggaggcacagggagaggggagtggaggcgcagggagagtggaggccgggagtggaggcgcaggcagagggtattgagcccagacagcctcattgagtcaaggctgtccaggcagtgggactccagttrttcttggcccaggtcttacccccaccccacatcccctcagggtgaaaacatcaccaatgcccctgaactgcagccgaatgctgtcacttggggcatcttccctgrgygagagatcatccagcccaccgtagtggatcccgtcagcttcatgttctggwaggtaaaggagccgggggcaagcttgccccgcccacctggaaaaccgtsgggagggattgggaccaagtcccaagcgtgtrctgaaggccacactggacccagccttcagggcacacccagctctgactcacccatgtcactgctgaygcagggtgtttatttctgggcaggggtgggaagtgatactggcagtgggccttgttctattccgggaaatgtcctgttgagcagagcccttggagagccctgttaatcttgcctstgtgtgtgtgtgcatgtgtgcgtgtgtgcgggggtatgtgtgtgtaggacraggcctttgccctgtggattgagcrgtggggaaagctgtatgaggaggagtccccgtcccgcaccatcatccagtacatccacgacaactacttcctggtcaacctggtggacaatgacttcccactggacaactgcctctggcaggtggtggaagacacattggagcttctcaacaggcccacccagaatgcgagagaaayggaggctccatgaccctgcgtcctgacgccctgcgttggagccactcctgtcccgccttcctcctccacagtgctgcttctcttgggaactccactctccttcgtgtctctcccaccccggcctccactcccccacctgacaatggcagctagactggagtgaggcttccaggctcttcctggacctgagtcggccccacatgggaacctagtactctctgctctagccaggagtctgtgctcttttggtggggagcacttgcgtcctgcagaggaccacagtgggtggcacctcctgagaaggcgaggagagtggttgttgccaactaagccctcgaaccaaggcagcctccagagccagcctgggactcccagtgaacttacmcttggagcccgtgcagtacaggcaaaacacgcaagggcatcaggcactggtggcatcgtagaagagatgtggcaaagtgctgtacccttccacctcctagaggtgggcagctgggccccacctacttgtgactgaaggggcacaccactgccctgcctgcccacttagccgtccatggcaccagccccctggatgggcattgggctgacacctaccatgctgctttttggcacagttgtctattctgagccttgagagaaaaagtgccccttaagggttgaaggcagtctgaacccttgtgcttggtggggctcgtggccttccccttttgcctggctgtggaggcctgatgctgccccgttccctgtcagaggctaagatgagatttgccagcacaggggccccagatctgcctgggcctgtgcagcagcccagcttcctggtgtatttttcaggtaggcccttgtcctgccagctgccttcctcatcccctcgtcctgtcccagaggttatctgcctggcctggctccccacgagtcacctgcaagccccagggcctgggggcagtgactggcaggtgcagatgggctgtttcgtgtagtggaagagcagcctgatggccaagggggtggacgcaattgtgggatgtcctctttactcccttcctggcctcactggctggggcagaggggcagccgctaggagagactgaaagcagcagctaggactgaggagtgggttttattgtccttcagagctcttcaagctgtcccctctgtcatcactccctggatgtgtggggcatggttccttccctgggaaggctaagttcagttctgttttttattctatgagaacaagtcacagctgcagctgggccccatgctctgccccargcccccaaccccgcggtgctcyggcggcttcctgtccactctcggggcccttggggcctggcttgctccagggtcttgggctactggcagctcctctccttgggctcctggctgccaggcgttggtgccacttcttaaaggcctggaaccagggaggagaggaaatgctattgttgtgggctttctccggggtctgtgctgtgcctgctagagcaacccctgtacccagctccttttgtccccagggcccctccctctgccccaagcagccagccagtcttgcctaggccaaatgcacaagctcagaatagatctgatggtgagctgggaagctgtactcagagcagagcaaatgagggagggggcgctcaggacccaggccctccatgggctagtgtgagtggcagccatgcctcatgccacaccttcttcgcaaactgatggaccgggtgggcctggcctgagctggggccacaaatcaaagcaagggctccagcatccagcctgtgtgttctgtaatggaactgaccccctcccctgaaaacgaaggggccccggggctggcaagcagggaaagctccacggtgcgyggctgtggcacagacttctggaaggctggctgagtggaatgcagggaagagggcagtacctgggaaaggacccacccatcttcctgctgctgtaactgctgagccactcgcagtcgcaggatccgctgccaccacgtctgccaggcccatctcaggtgccactccctgagctttggggacagttggcagagaaggcctcttgtgctcacgctcccccgcagtccccagcccttctgcctttctcccccgacactgctgcaccagagtgaaagggctatggcaagggggtgtcatctgaggagtattaagaatgcagattcctgggcctgtcccccaaggttttggagtcagtaggtccaagggccatacttttgagaggggtttgggttaagtatgaggtgaaatgggagatggtcagtgtggagaggggtgcacccactcaccagggtccgcaccagctgctctgccccttgggcatccacccagtgctgccatgccactgccaggcacctggcctgctgggaaccccgcagcccgtgaagcagtgcctcgaggcaccggcgctgcaggtacttcctcctgatggccaagagcatcgtgacccttcagggccagaaggagggcagagccatgggcctgggcctgcttttccaggatcctgcaggaacgagcactggccagagagggcccagctgtagccatggctcaggcaagcccctcagcccttgcccccatccctcggacccaccaaactgcacacacagctcctcttaccgtagcctccgtttatgggccttgctttgggctttgsaggctctgggctcagggctggagtgcgctcttggtccctggtccctcgtccacaggggcaggcctgggacccagctactctgtccaggccactgtggccagagctggaaggcagggcagagggaatgttccctgcaccctggaaaggggagttgagtcacaagagkttaaggtgggtccaggaaggcagctgctcttagtgcccgcytaggagttgagtacagtgaggagggtggaggaaggtgctgagcttagccttgtgccctgcccccatctccccaggcctccagcctctcmcggctgcctgccrcccaaagagaaatcacaggggcggggcaggaatgcaaagtgttttctcagaacagctgaaacattccgaagagggaatggatggggagaatggtcaatacacataagaccgtgtcccaaggagctgatttccaggcccctgaggactggagaccgcttcacccctgcacttcagacaccgtttgtcccccggggcaaggtctccttactctgagcccaggccgttccccttggcttcctccgtccacccaggctgcactgcagtgatggcgcgggaggcaccagctctgtggcctgtgtccagcagctgygggtctgaaggartagccagagaggagcacctgaaccccatgggcttggacttcctggggccccgctgggatttcttcgctgctctagctggcaggacacatcccggcctcttcttccacccattcccccatgtggctgaagacattccaacaatggggtgggcccataatagttagccctcagtcagttcccggagcacagccctgggagggggctatttctctccccactgaaaacatttcaaagctgagttacttgtctgaggcctcatccctcggaagccgtctgactccagagtctgagcccccggctagtaccctatagagagggggctctccaaaggggctgctggggcatgtgtgcctgtggcagaaaagaggagaccctggaattcagcaccctgggtgccattcccagcgtttagtttctagaggcctcagtttctccatcagcttatgggatccttgtctttactgacaagaatggaatagaaatgtaaaagtactctgaaaagcaattgccctgtaacttatctagaaagaaaagaccctgagactccagaatctgctgttgccatagccccatatgtgtgaattctgcaactagccaaggctagttcctttcaattccatttaaaaaacaaaaaccagcaggtgtggtggctcatggcgtaatgggcctgcccaatgctttgggaggccaaggcagrtagatcgcttgagcccaggagtttgagacaagccctggcaacatagtgagatcccatttctacaaaaaaaaaaaaaaaattagccgggtgtggtggcacacgcctgtagtctcagctactcaggtggctgaggtgggaggatcgtttgagccctggaggttgaggctgcagtgagctgtgatcgcaccactgcactctggcctgggcgacagagtgagacactgtctgagaacaaaaaacgactgaaaaaaaaaatcaccttagctttttctcttagaatcttctctaaaatgtattctttgtggcattctgaaataggattcatgatgatgcctgttgatcttagggacactacctcacctgccagtatctttggggctgtgtccttcaaggacatgtccccagactgctgtgcagtgtcattttttgtgtttggtttggtggtggcttcttcccccttgctaggctatcaacctcttatcaccayttgttggtgtcagaactaactgcttctggtctggagagggactgaccgatgcctttgggtagagagaattatgaaagaaattttggtatttttctactttatattttctgaggtttctgtaataagcatatttcacttttccaataagaaaaaaaaaaaacttggcctggcgcggtggctcacacctgtaatcccagcactttgggaagtcgaggtgggaggatcacttgagttcaggagttcgagaccagcttgggcaatatggtgaaaccccgtctctactaaaaatacaaaaattagccaggcgtggtggcgtgcacttgtagtcccagctactcaggaagctgaggcgggagaatcacttgaacccgggaggcagaggttgcagtgagctgagatcactcctctgcttcagcctgggcaattgagccagactctgtctcaaaaataaacaaaaaaacttgacaaaaaaatgctactgtcctcgtgtacctattctgatcctcaactgcaccgtgagaaagcatgcatttcaatgtctccctaacaggctgtgacccaacatgctggtctttgcggccggacctgcagtggcctggcactcgagaggtgccaggttcatctttgctgatggattcagagttgcttgtcagaggctgactgagaactggggagaggtggtgcatacgaggttgctgggcccctggggaggcatccagccatgctgccaccacgggctgaatcaagctgattctaaggccggtggtccgagggtcatttttggacctcccgccctgcctaggctcccttcacctgtttccaaggggctggggcgtccagcagcaggctccccctgctggccatccggggccagagcgtgaggtcagtctggggcttggggcgtaccttgccggcccctggcagtcccagccgcaccctgagctgcactgtccgcaggaagcgcctgagctcagccggccggagctgggtgaggatggctcgctggacaccgccgcgcaccgccgactgcaccgaggcctctaggaccctgcgggagaggaaggagtctgcagccagggccatcaaggccaggactctctgcagggagcccccccagtgccctgcgggagggggccttctgggcccagccccaggctggggcccacccacctcccacactcccttttctggagggagaatctgggtaaacaggatggagagcgacctggaaggagaaaatcacagacggggacaagcatcctgtttaggggcagagaggggacagtcctgccagtgccactttgcctccccttccctggcaagagcgcgtttatggcgcttgctgagtggctggctgtgctggtgactgcaaggcatgaccattagagacttccccaaggaggggacacacagcaagaggcggtgycaggatgtggcccaggactagatggccagggcggcctctccctgtcacccccaaccaccctcttgagcctttgccctgccacccagccatgaattacgctctacccctgccaaaaacaggcttgaggcctgagctggaagcacagagtggggctgcacttagaccacagcactcaccaggctcgcggcttccaggaagcatgggctcggctgacctggccccgacaggactcatgcacccacagagcccagcaccaagtccagcactgggctgcctgggccccagcgctctctcctgcctgctgctgggcctcatggtgcatgcccggggccactggccatgctgggaaggcctgtggggcccgggccttcttctgctgcccatcttcctggccttgctgcccgcagcttctccagcgggcaagggaggcctgggccacacgctgctcctgtgccccggctgccacttcctgggcttcccgccatgtggcaaacacagcccccagtgctcttctcctcaggccatcctgaaaggcttgatgctgggcccggagcacccccgtgtctcttacaacctcacaccaggcctggaagtagctgcaaaacagacacattgggccaggtgtggtggctcatgcttgtaatcccagcactttgggaagccaaggtgagtggatcacctgaagtcagtttgagaccagcctgaccaacgtggtgaaaccccgtctctattaaaaatacaaaaattagccaggcctggtagtgggcacctgtaatcccagctacttgggagtctgaggcagaagaattgcctgaacccaggaggcagaggttgcagtaagccgagatcgcgcaagtgcactccagcctgggtgacaagagtgaaactccatctcaaaaaaacaaaacaaaaacagatgcatgggagggcttgtctcgttctcagagtcaaaagtcacatttattcaaagttacacttgcaaatctcccacaaaacagtaaacgaccagtaacaggtgaaagcactggctttccatcttgcaacctcagcctcagagggcaggggctgccctgcgagggggatgggaaccagcagtatgggttcaagtcccacatcagccatgccctgcctcccatcacatgcccaggtggttggtgagggagaggaacaccatctctcactcagtgagaagccaagaaaaaaaaccatctacggccaggcacagtggctcacacctgtaatcccagcattttgggaggcagaggcgggcggatcacctgaggtcgggagttcgagaccagcctgaccaacatggagaaaccccgtctctactaaaaatacaaaattagccaggtgtggtgccacatgcctgtaatcccagctactcgggaggctgaggcaggagaatcacttgaacccgggaggcggaggttgtggtaagccgagatcgcgccattgcactccaacctgggcaacaagagcgaaactctgtctcaaaaaacaaacaaacaaacaaaataaccatctacaccctcagatgcaaaagcacagacgtcagccattctgtagccaacagttcactgccccacggggacactgaacattcgcaaatttgtactgaactgtgggaggagccattctgtgtcctccgcttggttttacaatatgcattcatgaactgtatacatgttccaccagaacatctttacttaaatgaagatttcactctcttctcttagcgacagtgtacagcagaattctccttgctgtaactcctcacaatgggcgttatggtagatttccgaggagtggatttctcctcctttttttttttttttttgagatggagtctcgcactgtcgcccaggctggagtgcagtggtgcaatctcggctcactgcaacctccgcctcccggattcaagtgattctcctgcctgagcccaagtagctgggactacaggcacctgccaccatgcccgtctaatttttcatatttttagtagagatggggtttcaccatgttggccaggctggtctcgaactcctgatctcaagtgatccaccttcctcggcctcccaaagtgctgggattataggtatgatccactgttcccagctgatttctcccatcttaatcatatcctctaaaaccaaagaactgacctggccaggagctggactcccggggcttgttggggccacaggttaggggtggggtttgccaccactcccaaaataggtaataaggtgtcagtggtcatggccctgtgtttccaggctaggatctcccttcatgccccttttttcccaggccacaggcctcctatctgggccaccgtctgagcttcccaccccctgggtgctctccttgctattccttgcgtggggaggaccaacaccctcccacccccaggcccacccacctctgcagtagcagctgctctggccgggtcactgtgcatctctgatgagctgctgcctgctgccagctccggaacaccaccttctgcaggccctggaggtggacctgcacccatgtctggcacttttcatgcaggaactgctgccctggggccagagagatgctgaagagccactgggtgctcaccccagcctctccccatgggcctctacgcagccagcccttcgccccctaccaggtgggaacacaggaggccaccctgactgtctgggttaaaaagcctctattatgggtgtcctgctggtgaccaggccagcccagctcatagagttgttgggtttgtttttgtttgttaattttgccacagtattttcaaatctggagaattcaggtaaaaatctaattttctatttttttttttttttgagacggagtcttactccgtcgcccaggctggagtgcagtggcccgatctcagctcactgcaacctctgcctcctggattcatgccattctcctgcctcagcctcccgagtagctgggactacaggcgcacactaccacgcctggctaattttgtgtatttttagtagagacggggtttcaccatgttagccaagatggtctcgatctcctgacctcgtgatccgccagtccgggcctcccaaattgctgggattacaggcgtgagccactgcgcccggcccaaaaatctaattttcaatttttctgtaaaaactagaagttctggaaacactggctcagtgttcctgccggggaatgattgggctgcataagcagctgtctccagcggacaggacatgactttctagaaccaccacagccctgcctgccagctcattaatgcgatatgtcggtgtagtgggcagcctccaagacagcatcctgtgttcgtgtcctgggcaatgccccgccttgaatacaggctgggtttactaatttgcttttaacagacagaatttggcagaagcaatgggatgtcacttctgatatcaggttataaaaagactggttggggctgggtgcggtggctcacgcttgtaatcccagcactttggaaggccgaggcgggttgatcacttgaggtcaggagttcgagaccagcctggccaacatggtgaaaccccatctccactaaaaatacaaaaattagccaggtgtggtggcaggcgcctgtaatcccagctacgaggggagctgaggcaggagaattgcttgaacccagggggtggaggttgcagtgagctaagatcgcaccactgcatgcctgggcaacacagcgagatcgtctcaaaaaaaaaaaaaaaaaaaaaaaaagactggttgggccatgcaacagctctttttgcccagaggccaagacccagagagcaagcctgccttgggaccatccctcctcccttcactggccacattcctcagggcttctagcacactgcaccctcagccagcctctgcaaatccagtccttcccactgccctattttgctgaccccttcccacgcctcaacttctctcgccactgctctgcccgctgagccctcctcacctcctcctgggaccctccctgactaactctgctggcccctaagggcaccatgactctgcccacttctctcccaactcagggctccgaccagtgactcctagaggccaggtgaggataaggatgaagataaaggtgatgacatagggactacattatccccattttacagatgtgtaag

SEQ ID NO: 95241 - DNA, 28450 bp, Homo sapiens
ctacctcacaagcaccctgtgatttggtagagagactctatttgaaaataaactagcccagagaggtcaggcacagtggttcactcctgtaatcccagcactttgggaggccaaggcgggtagatcacttgaggccaggagaccagcctggccaacgtggcaaaaccccgtctctactaaaaacacaaaaattggctgggcatggtggcacacacctgtagtcccaactactcaggaggctgaggcaggagaatcgcttgaacccaggagctggaggttgcagtgggccgagattgcgccactgcactccagcctggcaacaaaacgagactgtctcaaataaaaaaaaaaaaaaaaattagccagatgtggtggcgcatgcctgtaatcccagctacttgggaggctgaggcaggagaatcacttgaacccaggaggtggatgttgcagtgagccgagatagcaccattgctctccagcctggccaacagagagagactctatctccaaaaaaaaaaaaaaaggaagaaagaaactagcccagagatgttaagtgagctacccaaagtcacacagatgacaggcagactgatacagtggaaaaagtcctgctgagatggaaaagacactgtgctaggcagaacttaccccacaccaagagctgcccctgcacaaaccatccctttttctagcacttcagtcatttttttttttttagttacagaggatcctgaactcagatgaattctgtgtttatggtgggaaggtttaagctgtgaaacaggaggaaaatcttagggtggttgcccctttggcttcatgccttcaacaacatggcactcatttgagtggaacacagacttttatctgataaagagcattgaaaacacaaataacatgggcttgaggtcatttaaaacctcaccaaaggactgattccagtctatctgcaaggaaaagaaagttactttgtcatggaaggaaaggaaacaagtgagaaggaaccagcatttatgagagtcagttatgtgacagggactgtgcacatagcctctcactgaatcctgagagcactctatgaaggtagaaatcataagccccacccttagaaaaggaagctgaagctcaacatggttgattatttgatggaaaccacgtggcgagtgagaggcagccatggaccccaggtctggctgattcttcttactatgcttagctgcctctctgacttataaacattgtattaaaattctttctaatgggatttttacctactatatacccacttttatatatcttctgattaaattcattctaagttccatataaccccaaaatagatgtctctgaaaactttttcttgtttttttccccaactcaattacagcaggatctgaaaactttttcattcaatcaatatattcacttgtatttatttagctccttctaggtgacaagcactgtggtatgtgctggagatgcaacagtaaacaagccaagcactgttttgccttcatagactagaataaacttcttctgtaaagaatcagaagttaatttgtatgctttttaggttgtggggtctctgttgcaactaaactctgccattgtagcataaaagcatctataagtaatacataaatgaatgggtgtggatgtattccaataaaactttacaaaaataggcacaggagttttctgacccctgctctctagaggaagactcagaaaggtaagcaagtaattaacaacacattgtgataattactctaattgagaaaatagtgagatctgggaatatattggagggacacctaagtcagattgggagagatcaaggatggcttccaggaagaattggcatcctcaaagcaacctgaaggatgagtaggaattaaccaaacgtaattttctggtcctcttccacttactgtatttatgttttcctttaactgcatttctcggtaacaattcttttaatcttcaaattctttaatctataaatacttgaatcatttgcttgtctcattccttttcatcaaaataattcaagtcctctccccatcctcccacaacaagtacatcagctttttccttcagtatgtcaacttctagattttactcaatccatcaacagtyttctaaaaatctgaacaaaaataagctgaactttaacagataaattttatggtgtgtaaataatacttcaaaaagctattggaaataaataaataaagccagcatcctgactcccaggagtcctcaaaggacaactgaactttgatgaagccagtagagaccaggttcttgagaaacccaactttatctcaaccctcaaaaatcctcacagaatgtgaactcatagccaaaaatcaaaagtacatacaatagcaaggtattataacaaagagcttcagaaataacaaatagcaaagtctgacctgcaaagacttcaggtatttgaataagatacaaaaatataaaataatatatttaatatttttacagaaataaaagaaaagattgggtgtacgagcaagaaacaagaccataagaaagaccaagcgaatttgaaaaaaaaaaatagaacttgtaaaaatgcattaataagtggattaagaaacacattaaacataactcaaaaaaagaattaaaatatatgtaagtatagtttgtcaatgtacaaataaaaagtaagatttttcaagaaaatattttttaaaagaattagttatttggaagagatagattaggtaacagattaatgctgccaaagagcgaattagagaactggaagacagatctaaataaataatcataaggattaatgcagacatacaaggagctagaatatatgaacaacacataaaatgtactagaaagatataataaagagaatgtggaaaaggcactatttgaagagctcaagactgagattttccagaataattgggtgactacaaaacttcaatcatgaaattaaaagcccattacctagaaagaattcttacttgtacactatatagtacttggccaagttacaatgaaggcgttttctactgtttttagaggcaatcaggttatgaaggaactatggcacttacataacattatatttcttgggcttcaaaagcagataatattatgaaaaacattctgcacagtttgcattttcctcactcaccaaatccataggtttttttccaaattacttcactgtttttagtaaaaactgaaacagactggactctaggttttaggtaatgttgaaatccctggagatcttcagtgtctggtacaatattagacacagtagtgatggcataagaaaggttgttgactgacaaccagcatgatcaggttagcaataatgggagataaggaagtttattgaaagtgacatctgaaagaaaccaacctaacagtgtcttcccagaccttgaaataaaattggatttagcaaatatcattctaatacagatgtcccccaaccaccttacaggaaaagctcaggttgtagtaagaataatcttagctaacatttatgaatcacttactattaccaggcactgtgctaagtgtaataaggagaagaaaaaaggaatgattttaaatcctactcaacaaactgtctttagccctacataactgaaaacaatttgcttacattctctaaatgcatcagtgaatcctactggtatgtttctattattagttgtaataccaaaaagtctcacaggtaaataaataagtaaataaataaaattattttggcctggtgcagtggctcacaccagtaatcccagcactttgggaagctgaggcgggtagatcatctgaggtcaggaatttgagaccagcctggccaaaggtgaaaccccatctctactaaaaatacaaaaattagccgggcctggtggtgggcacctgtaatcccagctacccaggaggctgaggtgggagaaccacttgaacgtgggaggtggaggttgcagtgagctgagattgcaccaccgcactccagcctgggcgacacagcaagactctgtgtttactttaacagagaagagtaatctctctctctctctctctctctctctctctctctctctctctctctctcagtatacatacatacatacatacatacatatatatatatatttgagacaatctcactctgtcacccaggcaaaagtgcagtggtaccatcatggctcactgcagcctccacttcctgggctcaagcaatcctcccacctcagcctcctgaacagctgggactacaggcatgtgccactatgcccgactaattttttttttattgtttgtagagatacattcttgctatgttgccccggctggtcttgaactcccaggctcaagcaatcctcctgccttagcctcccaaagttttgggattacaggcataagccactgcgtccagctgataatttttaaaaaaacttttaaaaattgacaaaaaggttggggttgttgaaatccttttttctgaacacaggaagaaaatatataaaacaaaatgagaacaggcacagtggttcatgcctgtaatcccagcactttgggaggccgaggtggatggattcccaggccgaggtgggtacactccagcctgggcaacaagagcaaaacttcatctcaaaataataataataataataccaatggaggaatgggtaagaaaaatatttcttcatttaacctgcagaaagctgtgaatctaccaaatacagcatagtcttggcctcagggcagtgagtttcaaactttagggtacaccagcatcaccaataagcttattaaaaatatagattcttgagcccaactggaagaattctgatgtagcaggtttggaataagtcctagaattctgccttttttgcaggcaccacaggtaattgggcaggtggtacagagtcctcctcccaaaactctgtcttaggatagagacacaagccttccccttttctatgaatcctgagaattgtgaacagttctagtgcaaccacagaggtaatctgatttacaagggttcagtttggtctggatcctctgatctggaactattatagttatcattgtgattatcagagagacagattaggggcagcattatttccaggcatgatgtaaactgctatttattatgatggcagctttaataattgatgcaaaagtatgcattaaagaaattattttcatatgtctatctactccttccctgattcacaaagaaattggtctcacctttttatagttgttatggtagtgggccattttattttggttttctacttcagattcagcttcgagaatgagaaagcatagtttgggcaaaatagatgtttgtaacattttttattaacctgaagagtgggtgatcaatatgtttacctattgcatagcagcctgaagcaccacattgagtggctaaaaccaggaagatggagagaatatgtaaacatctttggtaaaatacagttaaatttactgttactttgaagcaaccctttgaagtatcccttagcaactggttccttaagacagagattattaagtgacagatcctaattattactaagacataaggttttatcatttctgtttaatgtacgaaccacctgcatttgctctcattcattgagtcaaacaggagaagacatgaaatatatttaacatctacttattaaaatgaagtccccctgcccaatgaatttcatacaacaatgttcactccaaagagtgaactatctttccctatttttctgcagaactttttgatgactttgcaaaccagtcaacaattcagcacaaaggcatccagagtcacgctggcatgttgtgacagaatcgcacaattacatgggatccatcccactctgaaaatgccccgaacagcgaacagcacaggtaaatcaaatcaaacgtcagagccagcacagcctgagagcgccttgaaactcagactccacaatctatggggaaagtgtcctgctgtggcatgaaataaatgaaacasaaaatgatggcaagactgctaagaacatcctttgctttgctcttccttggcctctttggggtgctgggggcagcaacaatttcatgcagaaatgaagaagggaaagctgtggactggtaggtaaatgaaatggaaggactgctgcatgcaaacagcctcggtwcagagttggcctggctcactgcgaagttcctaaggggaatgtccattctctttcctccctttacaaataaaggaagttaaagtgtgcaaatcggccaaactcccaggcaggggtaggcttctgagtgacggagtttccccctgaaaaagagctgagcagcccctcttgggcctgattcactgttctcagcggggcaaggctggtagccacagaagtgggattgagctgacagcttctgtgagctggcaatttcttttaattacatcatggcttttcctaacagaacacttccaacatcctttgaaagactgacasagtaaagaaggcagattatttttttctgaaaatggagcatgtgctgctccttatgagaaagagaagggggacctggtcacacacagcactgtttgcctaacatcggtttgtttggaagcagaggcagctgttgccatgattggtacgtaggccactggcctgttgtacagtgtcaaagacattaaatgctgtgttgcattatagtcatgggttctcctaaagctttaactactttttcaccctttaattgggatatttaggtttgccataatggttggtgtcaagctttttgtgtaaacttcaggctacagaacacagatatactcaaggcagtagtcagtctttcctcagttactgagctcaacagaggtctgtgtggagttttgaaaatataaatatgaacgaaacatggttcctaccctcaaggacctcacagttatgtggtaagggcataggtggaacactggggaacagagagcccagaaaacttctctaaggatgtaatttttgagctaagttttaagaacaattaagaagtagctggaaaaagaagggatgtgcaagagcatctcaggccaatgaaggagcaatgaggaggtagagaggcaagaagcaacatggaaatttgggagttgcaaagtagtttggtattgctggaacttcaggagaatacaggaagatgaccggaggtgaggttagagaggtggggacagccaaggggtctgtgtgctgagctacaaggtttgaacttgacattgaaagggagctattggaggacttcacgcaggggtgtgaatggtcagatttgcactttaggaaacccattggcagtactatgagggctggatggatggggagcagcctagaatcactgagaccaggagcacttttgcagcattacaggtgagaagaggtgtagacctgagttaaagaagcggtcatggaaatagaaagaaggacatgctgagaagacttggtgatggatgggctgcagccagtaggagaaagggagatgttaagaaataattttaggttggccaggcgtggtggctcacgcctgtaagcccagcactttaggaggcctaggcagacagatcacctgaggtcaggagttcaagaccagcctgaccaacatggagaaaccccatctttactaaaaatacaaaattagccaggcatggtgacgcatgcctgtaatcccagctacatgggaggctgaggcaggagaattgcttgaacccaggaggcggaggttgtggtgaaccaagatcgtgccattgcactccagcctgaataacaagaatgagactccgtctcaaaaaaaaacaaaaaacaaaacaagaaagaaaaagaaagaaataattttaggcttctgcttctgwgactgcatgaatatgttccctaatagtgtgggatgagcagatttggagcaaaatattataaatttggtttcaaaaatacggagttgggggttaatgggacatctttgagtttaggtttctctggacctcagcagaaaggtctgggctagaaacagactgaggactcttgagtacataattagagacagtcacccaggaaaaatgtttaaaagtactagctctcaactggtgtgccacrgcacactgatagttcacaaacccttcactggtgggccaccaaattgtgattgayatggaaaatcatttttgccacaagtgaatggacatattacttagcaatgtctgttagagagaatataagcaacttgttgccaagctgctaacatttattgagaaaggtaaggaaagagaccatcaagtcagcaccaaagaataatttcatgtttcctgccacatgtgaggacctgaccctgtaagaaagcataagcagggcaggaaagagttcacttaaattaagtataagaccgaaggggaccaagtgaagagtgtgcagcttttacgggtttgtgacactgttgtatggtaatagtgtatatattataatgtttggtgcactgtgagtgtttaggggttaatggtggggttcatgctmttagaaagtatttggctagatcagtggttctcaaccgagggtaattttgccctcagaggatttttgataatgtctggagataatttygattgtcacaacttggcagtgctactggcatctaataggtagagggcagggatcttacaatgcacaggacagctcccacaacaaagaatgatcggcygaaaatgtgaatagagcacactgagaaacgctgagctaggtaatccaataatgccttaatgctgtcttggctgagctacctctcctccctgtgagatatccaagggagatatacaaatggaaaacaayagtaaaggaaggaaagggcctacttaattacttggttttagccctgaatcwtcaaggcagagtattckgataaactgagctgaggaatgcagcttatgasaggggctcaaagtaccttccacctctcctgaagcccaaacccaaatctcatatccagtcagccaactgcatggtctgggccttggccttctctcyactgtagccacatggatcatggaagcaacagaaagagccactctcaatgtatatggacttccacttcagggactccacccaccagtataaccaaggtcttagaacatatccaatcagatttttattttcttctctggggaggagcaaagataagagtgaagaaagaggcaaagagcttgagcaaatccctttccttagaggccttccatgaaacakaaatgagagatatattaaagtgtgtaatacagttactgccacaggaaaacagtcaataaatgttagtaattyataatsattttgtctgttaggtttactttttataagttacctaaaaracaaaacaaggaaagtggagagactgggttagagtacctgtacctagactctacaactagaagctggaggaagagtgagcaactaatgaatgacaccaagagtgttttgggaaggacattacaacagctatatgaagcatatgcctctaaggtatgttatatagttaattgttcacttgaataatataaaatgcayaaaactgaatccaaagccttcaccagagttttctgttcacccacccaacccccaatcctagcaccttgaagtgagctagctcaggaccagctcaagacaactatctgagtcaatctgactaagacytgaggaaacatgtcatcatactctacagcaatgccaaatttacttggcaccatgtccagtggtgtcactaggcaaggtgtgaattaattgtatattgaagtcttctggctgccaaaatgtctgtcagtttgcttattcatctaatagaaatagggagaggagcctctgctgttacagggcaatacagaactgtgattaacatgctatgagttatggattgtttatatcatggtgttgatcagtggtggtgagctcagtaaagggttctacttgatcttccttttcattaattgttttcaaaatgatatgttgaaaactaggactctagttcaaggccctagaactaacttgtctggatggagattatccctgctatatctggactttatcaggcaatgagctaatcagccaaagagacacaggtaagtaggcctgctggcttattatgggcatgctcccaatattctaggcatcatctgttgcttagtttcaagatactgctttccaaccagragtgrcaagtaaaatcaagccatgattaacatccaattatactcatgtatgcatttcctaacaataacttatagacaagtaaatatataacatgactctgctcctataatatgctggactgtatgctgggcctttacatatgtcaagtaatttaatgcccacaacaatcctgttttagcctctggcactgcacatgtgtatctgagtatttactcaaaatacacacggaactgtcatggtgtgtggtaatattcatgttatttacctgccattaagactagccttcagagccaagctacaaagttaaagcttatctgtaggctatttgagaacatgtgatgtgccaagcacttttctagatgcttttcaaaattatttgtctcaacaaacctgctttgaataaacagacgacagctgacccttgaaccatgctggggtaggggtgccggccctcatgccgtcaaaaatttatgtacaacttttgacttcctaaaaatttatctactaacagcctaytggatgccttactgataacatcagtttgactggatgccttactgataacatcaatagtcgaataacatgtaatttttatgttatatatcttwtatactatattcttacaataaagtaagctagagaaaggaaaatgttattaagagaatcattaaggaagagagaatatattcactcttcattaagtggaaatggatcatcataagtgtcttcatccttgtcatcttcctgttgagtcagctgagcagaaggaagaaggggaagggctggtcttgctatctcgggggtggcagagatgggagaggtggggaaggtggaaggggaagcaagagaggcaggcatactcagtgtaactttcacatgaaaatacataatgaattctatctatttgctttttcatttctccaaaaatgtttctatacagtagtaatcattttttcaccatttgctttagtttcagtgcccgtatcacagaagggttcatgttgtaaaagaagttaaaagcaatctttwtatttttttcttttgagacaggatctcattcgacacccargctgcagtgcagtggcaccataagagctatctgttgcctcgacctcccaggcccaggtgaccctcccacctcagcctctggagtagctgggactacaggcatgcaccaccatgcctggctaatttttttttttttttttttttkgcggagggggygggtaaagatagggtttcatgatgttacccaggctagtctcaaactcctggactcaagcaatccacccatattggcctctgaagtgctgggattatacacatgagacactgcacccagcctaaaagcagycttgaatgatcagactgcgtctaatattgatytgtgttcttgcaccacctcttctatgtcttcttgctcatcatctggctctggttccattgagttatgttctgttaatttctctagtgtggtgtctattagcttttgaatttctccaggaatcatatcttgaaatccatcacccccaacctttctysccatatccacaatctctttcatgactttctygattgactctgtcataaatcctgtgaagtcatgctcaacatctgaacacagatttttccagcaggaatgtattgttttgggcttgatggctttcatggcttttcctataacagaaatggcatcttcaacgctgtaatcctttcatgtgttctatcatgtgttccatagcactgacaatcctttccagagagcatcatatgtaatgagtcttaaaggttcttatgaacctgatttagaggctgaatcagagacattatgtttgggggcaggtggacaactttgacacctttggtgttgaactcatgggacttttagtgcccggtggcactatccaataccaaaagaactttaaaaggcagttccttactggcaaggtaccttctaacyttagagacaaagcatcactggaaccaatttagaaaaagggttttgttgcccaggccttcttattgtacaactggcagctggtatgtatcttttcccttcaaggctcaagagttagcagctttatagataggtgtagtcctgattatcaacccaactgcatttgcacaaaacagtacagttagtctgtcccttcctgccttaaatcctgatgcttgcttctctttcttaccaataagtgtcctttgtggcacttttttccagaataaggaattttcatctgcattaaaaacctgctcaggaagaaattatttcccctcaatgattttcttgatggcatctgggaattcatctgctgcctcttggtcagcaaaagctgcttctcctgttatcttaatttttttttttttaggccaaacctctttctaaaattgtcaaaccatcctttgctggtattaaattctccagctttagatgatctaccttccttctgctttgtcatatagtgacttcactttttctccaatcatattagagtctatagtattcctttcttatagcaatcttgcacccatataaaagctgcattttaattttaagtatgagctataaaagtattttgtaaaaagtgcaaggttttcatgcctactggcatagctgcagtgagggcttcacaaatttccttttcttttttcacaatggctcttatgctggattcacttaacttgaaatggcaggcaactgaagctgcagacctcaatccgcagtacatatcaagcaattcaacatcttcttataatgtcatgacttgtctttgcttgttagaagcatttccagcatcagcagtggcactcagtataggtcctacggttttattcaaggtttctgatattgccccaaacatgatgaaaaatatgcaagagctgtgagagatcacttttgactacagtatgcaatttactggagagaactgctcacgtggaggttgttagtgtcatgtggcattttcagcagatattcacaagacttgagctcacctcaatggtgacaaaaggtggctataaaattattacagtagtacagtattactacagttaatttaatgcagttatgacttagtactgcatatttatgtttgtttatatttcttgactgtgaatggcaccatgtttggtctatgtttgtatatgtaaattttgatgaattttaactttttataatagatttgtgcatagtttagggcagcaaatgawaaaatagactagtatctacatatattgtatgcattcataatgtatctaactttttcttaatttttaaaaatatttctaggctatgtggttcatctgtgagttttttttttcaaattgtcaaaaatctccccctaaattttccaacatatgtttttaaaggcctgcatacayatagacccatgcagttcaaacccaagggccaaccgtattatataaaatgaaaacgcctgcagctgcttctgctttccaggttggggatggggaccagragcatatctattagtgggaaaataatgcctacattgttcctttccacatcaacragactgctaggggaggaagaaggaaagagcaacattgtaaagcctctatcatttgccttagttggagtagataggccttcacttgccggaatacaataatgatctttgaaggtgcaaaggtagccccacaccctagcagggagacacagttaaactgctctgctaaacaaaaaagggacagaaagaagccagggattaaaaagcataagaaacatggagaaagactggggtaaggccttatggtgatgtaaaaccattcaatatttcttacctttagtaaaacctgccacatgcaatgtcttgagtgattggttctggggggaaaatgacaggaaagggactgatttccatgcctgattggcatagagccaaaagaagagagcaacagcagttggtgatatccaggtatgactcagtgttctttggaagctggaattatgtgccagaagtgactgtgagaatattactcctccaccccctgacctggaattgaacctctgacagagagtgaaatgcaagattagaccractggtttaaatctcaaatgtgaaggtgaccaaggccaatagctgggttacatttggaattgtttcccttctcttgcctttacaaataagaatcttccgtgtaccttcataaacatttatcaaactatattgcctgcacttgtgtgactatattttctgctagacagggggcagagactgtacccctcttgttcaacactcaatagtcaaaacaatactgaacatatgtgttaaaggaataaagctattcaaaggcacatgcctacatctacctwctcttaagtccatgatcttttccctttatcaatagcctctcttccaactaaggctacaatccacttaacctcagctggcagttacactcagttagaacaataaacttcatttatcataaaaaataaattcctcactggatsatcccagaattcctccatgttgtaccccaaaggcacacaaatggcctccttaccacattcaatgcaggttcacagagtaactaactcttcagagttctccaaatgatgatatgaatgccattcagtagctatgatcaattatggaaaatgaaggtaagaaaacagcttacttttcggggcattcctaagcacagtagacaagaatgctccaacagactatgttgtgcattgaaaaaaaaattttatcacatcatataattaagcaactrtgagaggcttcttcattgaatttgttttctaagaaaaaagcaagggccttttttaaggacataggttatcctttcctgcttttaattatgtcactcagatttttttaatattgacattattggcttcaattaaagttgtatcatcacacaaattaaatggaaccacctagaacaaatattagcaagtttctaaaacatgaaaaatagatactatcgaaataatagctttattttggctctaagatttggctgtttgaaaattgactcatatttggccttaccagaggaaatccaatatcacacagtaaatttcaccactttttttaagcaggaaaatatcaagttggaaaggtgaagtgacactgaaaaatggattgcagaaaaatcctctcataatgggaggaagggagagcagataatgagggatcctgattaaacacaacgctactacccagcagtgaagtgaagcacaaagtgtgcagagaaaatcagatcctgacagccagttctgcactgtgcctataatatcaatggaaaaaacctcagatgtaatccttggttggttgttcctacttcatttcctgaacaaataattcagtactcctttattatacactggttgcttaatcagaaacttggttccaraacaaccaagagaaataggaacattgccctcacacacagatcacaatgcacagggctcctgtcacatgagtaaaaatcatgcacagttaaaaatggactttctttcccctgtctttcatgtcacaggcttcatattgatggggaagctgcctattaggggaatagatgacttctcatgtgtattaatgaaagcaaygtattgcaggctgggtagctggtagaaatgttgtgggcgtttgtaagtggaagatttacgccattataaccctaatatattcctgcagagtaacaacacagcctatctaatatacaatgatggagtccctaaacctgtgaattacagcagaaagtatggacacaccaaaggtatgacaaagattcttggtttctctttcctactggaaatsaacaatttcttaaatatttcatcttgagtatccttatattccatactaaatagatagcctttcttcttaatagtttatttgagttattgaaatgtatgacttctatatcactggttataatataattatatgatttgacttggcaatctcatttttagaaatcccattttatttcttaacatattttaaaatatttgctttgcagcagcaggaatccaggtactgatactgaggacacacacacacaccagcaattttatatatatatatatatatgcacatgaatatgtatatatgtatatgtgcatgtagtatatatgtacaaacacattttagtcagatttattgaagtatgatttatagagagtaaaaygagctcttcttaacatacagttcccttggaaatatacatttttgaaaaagtattttaaatagctttttatattaatttttatcatgttatttacattatcacatataatttttattatcctttcacaatttttttatttctaaactttgcatatgtgtttgtgaactacagaaaaattcaaaatacaggtaaacaaaaaaatctataatcctaatgcccattagataaaccatatttaatcctttctactttttctaaaatacatattttaaaacatttttacaaaactactgtaatgactatttttcaaccttttttcaatttcatatatcataaataactttccatggcaacaagtattcagaagattccaaattcaaatgccttcaagggagmaggcaaatgatgtcagcaagtgaaaggaggsagttactattcaacttgcctgatacggamacaattttccaggagatgttgaaaattaatatttgtggaaaaactccccagtttttaaatgttggcactaaattcaaagtttaaaaaatactctgcaagcgcaataaaatgtatccacaggctggatttggctcagaggatgtcagtttgcagcctctgatttagaatatagtttgtaatggctgacaaaggtcatgaactttgaaagctttttatttagcaaagttgctctcctgaataccctatttactgggaacccaacaattttcataacatgctacattcttcaacctctcctccaacaatctcccacacyattcctgctctaccctgctaactgccacaaggctttggggaaatggctctaaagaagtagggcacaatatcaagtggaggggttctcttggccaacagatgccctaatatcctatggcatttgtaccaggaggataggattccagcaaattggcacactcatctgcacagaggataactcttgaaggttatccagttctgttacacacagaactttcaatattttccaccttgacacaggtattgattctatttccacccaaagaacaacagtatgctttcttaaaataggcactttgaaaaaaaaataactagaaggcatttggtttttaatctaacacttaggcaaacacgagtgaatcttatgtttgcatagtcatatgcaaactggaaagtctagctatcataccaaacctaccatgataaatttctaaacacaraaatagtcagatgtctgttttacaaagttctttttggtatgtcacaaaatgataaaaatctttctattttcttccttattggctttcaagttgtttattttgctctagagatttttacaaacgtaattaactaggatgctttagcacagcttcctttttgtctctttgcttcttttattgggcttgtagaaatagtgactcttctgccaataaatgggcagcagttttttataacaaattattgtgagtacatttcttcatttgatattttctctttcaactctgttttttagtcagcttttgaaaagagcctagctgcttagcagtgaagacactatctaaatcttgctaggtgactgtatagtttaacaaggtccaattccaatttagcaaatttgcwttctgccaaaacaaattttccttgtgatttcaaaatgaaattcctcttaactcttcacaggatggctaccttggttcccttttcgtggtggctttttatcagtaatcaggcaatgtgatatgtgccagaattgtatttgaaatctttgaaaaataagcatgatccttgtgattattagcctaataaaacactagtctgaagcataaatgggcttaaatgttgccactgtgaaccctattataaaagaagctttgtttttctgatttatctttrttaaatgtgtctttggtaggtttactgctgtggaacagagttcaagggttctggctgattcattccatccctcagtttcctccaattccggaagaaggctatgattatccacccacagggagacgaaatggacaaagtggcatctgcataactttcaagtacaaccagtatgaggcaataggtaaaactaaagtatgtgagaaaaaaaacgataactatgttgaagaaakgatttggaaatatattcataaatgtgtcacttcatttgttaatctattcatagaccctctgatacctagattctaatactggctttgccatggtgaggtcttgggcaggctcgcttactgggctttggctcttaatctaccagtgcagttgttgaacttgatcagggcagtagtttcaaatgtattcaggggcctggtagataacatatatgagtgaaacagacatgttacatgggaagtgaggatagtgatgaactggggtgttgactcacctagcttcccttaaagcctcagttccatcatactgtggctctacaggaatacaagcctaatgattacagatctccttatttctcatgaagtaccagaaacctagggtgtgtgtgtgtgtgtgtgtgtgtgtgtgtgtgagagagagagagagagagagagaaactgatttccaaatatgagttcaatcttaattttgtttttgaagttttccaggccacatgttccttgtaggccaccaacatgacacctctgagccagataatctccttttaagatttcaagctcagcgaaaaattcttagatttggcaaactgtggtgggaaaggagaagtagggacaggttggtagctaaatagtagtgaaaagcaacttgcctatagaaacaggagatttagaaaatgtttctcatcaaatttccatcttatggcaaggatcactgagctcctcacccaagtcaagctctagtctcactagttgaaatcatgtaatgatgccgaatatcacagagattaggcatgcacactgaggagatgatgattcttaaagctttttggtacatggagttctcaacttttgtatatgtatatgtacatttagaagaaaaaatatatggtcyccaaggccaaattacctgggttcgaatatcaatttcatcaattacamacttcataatcttgggtgtgtgatgtaaattctcagttaattcatctataaagtaaagataatgataacaacagaatttgcctgataacatgtttgctgtgaggattaaatgaataaacccatgtaaaacttgtaggaccatgtctggaaactaggaagtgcttaacaggtgttagttatttaaacaaaaagttatttgaaggctattggtttaaagaaagaaatgcctttgtttttgtgttgttttgtttttaaatccacaaaaagatctataataacagcaggtatttccatttgtgtcttaattctcaacttttctttactgtttcttgattcagattctcagctcttggtctgcaaccccaacgtctatagctgctccatcccagccacctttcaccaggagctcattcacatgccccagctgtgcaccagggccagctcatcagagattcctggcaggctcctcaccacacttcagtckgcccagggacaaaaattcctccattttgcaaagtcggattcttttcttgayggtatgaaagaccatcatcaaacaacatgctgtataattctgctgttgaactgactagggatagcttagagaaatattttgagtattcagagaaagagagatgaaaaaagggagcaaaagaaaaggaaaaaggaaagtcayggatcagttcgaacatcagccggctatatgagtcaaccacaaaagtatctcacaaccatccagccacgggccagtgaaaactcagtctccatcctctgcttggcaaggggccatagccatctccatttcttccattccctgagtggttattttaagccttctttactctcaagccctttacactactctgcaccctcactcatggcttccttttttccttcataaatagaacaatgttcactagggagaaaccacttctatatgctacccccvccccacccctccaacaatcttatctgttctccttcctttttgcagggtttctcccacccccaaagaagtgatgcaccccctatgctctgaaacctatctcagcctcagcataccttgatttgtccacctgatctgttctctgtgttccatttcagttctcccactccccaggctactttctcataacatacaaacatgcctaaaaaccctccctcaactctaaagcatctatagctctatttttccttttctttcagatttatttttttaaaactcatcagggccttcacttgctcaatgttccttcactgcagtcttgcttctgtctgtagacacttgaatctctccccagtcaccaatggctgtcttagatgacctcactgtcttccttgcttatttgcttccttcctttatacgttgaataaaatttactgaatgcctactactagccaagccctgtgttaggcactagagatcttaaacttgacaggacagagacagtctctgcagaatgtggcactgytgaaattctttcctttttgaaactctcaccttcactgattttggggaacacgcagtcccctggtctttctcccacttctaagtttcttctgccaggtccttttcctctgactactctttaggtgactgggttgccatgtggcccctacccttccttatctcattctacatacccatgctgggcaattccagcaagccctccaatgattctcaagtcttgatctctaccccagacctctatactgactgatgtatttaacagcaagtgagacatttctacttgaaggtggtacagccacatcaagttcaacatgccaaactcactgcgtcatcatcccctacaaatctactttttcttgtattctgcatagttacccagtcactccccatctcttctttttctgacccttctatcaaaccatcaaattcagtcagttccagatccttaataacactcacatgtattgtatcttctccaaactctttgccactgccatgggtcacacctgtgtttattgacacagttattatgacagccttatgtttttcctttcttctttctaacctgtccttcccaattcatcctgcccattgcctctcaactgatatttatgatcataaaccagtttctattaattctttactaacattcctttaaaaaytctccactgatttcaggaaaatccaaacactttggcatgatttacaaagttccctagaaactggccctrattccttctctagactaattttttccaaaggtctttccaggacaaagacatrtattgcttyattcgttttatagaacagaagatgtttgcaaacaccaacatcatcatagtaatgatgataataacttacatttgsacatcactttagsatttacaaaatgttttctcatccactatctcaattatgttgttattattgtgctcgtgacatccacatatcaggggtgaaagatgatttccattccagagtatattttcagggactaatctaagtgtaaataccaacctmactatctttctcctcctaaaccctagacatctttgcagcctggatggctcaacggctgaagacacacttgttaacagaaacctggcagcgaaaaagacaagagcttccttcaaactgctcccttccttaccatgtctacaatataaaagcaattaaattatcacgacactcttatttcagttcttatcaagatcaygccaagtggtgtatttcccaaaagggcaccaaaaatcgctggacatgtattggagacctaaatcggagtccacaccaagccttcagaagtggaggattcatttgtacccagaattggcaaatttaccaagcatttcaaggattagtattatactatgaaagctgtaagtaaacttggtgaaaggacacaggtactatcattgaaaaccttgacaatgggtcttcttccattacaccttctttatattttaaaggcctgtgaatatacttataacctgcatatcacaaaataaaacatttttctctcatgtttaccatttaatcttctatttaatggtaatttatttactttgcactatatatcatagacataaaccattatacacaactgagaacagaagaaataaaaagaaaaatatttttccacattagtcaactccaattgtttatggattgactggccacctagtagattacatttcctctccttcacaaagacttccctgactctcttccccacccttttttgaagaaaagcaaataactctctctgcgtattcttccatactatttgatcatattgctcctaaagttctttctcactggtttatggttaagacttatttgtcattctttcagctactacttactaattggatgatcttgagccattcacttggattctctgaaccttgttttttttaatctatgaaagrgagataatagctaggtatgttcaagtacctagcacagagcccggcacatagatgacacttaaaaataatggtggcatttgagtttgaattccagcaaaaaaaaaaacaaataagtttcagaaatgagtgatattttacaagaagaatgttaaagtcacattaggagaaaaaaaactgcataagtgtgactcatcaacttgaaggaaataaagaagtgtaacataatgaaaccagaatcaaatgcaatagtcttttttttttttaataatagagatgaggtcttgctttgttgcccaggctggtcttgaactgggctcaagcaatcctcccacgttggcttcccaaagtgctgggattacaggaatgagccactgcacccagccaaatgcaataatcttaatttcaatgtgtttctttttctggcattcttatcactacttgtaactgttatataaatggataataataaacttgtgttaagtactaattgcttaataatatttgacatatgtgttgttcacaatttcaagcagcttacaacctagaaaaagtaatcacaacaataataaagctagcgcttactgaacacttactatgtaataagtattcaactcatagtaattcaggattcattacaatttttttttttttttttttgagacagagtctcgctctgttgcccaggctggagtgcggtgatgcgatctcggctcactgcaagctctgcctccagggttcacgccattctcctgcctcagcctcccgagtagctgggaatacaggtgcctgccaccacgcctggctaattttttgtatttttagtagagacggggtttcactgtgttagccaggatcgtctcaatctcctgacctcacgatccacccgcctcggcctcccaaagtgctgggattacaggcgtgagccaccgcgcccggccgattaattacatttttatttaatcttcataacaattctatgtagtaggaactgttattatccccattttactgacaaggaaattgaggcctacagagttttaggaacttgcctagtatcatagaggtccatcttacctctgaggctatcaatcttaatatctcaataccaaccaaaattcatggcactagttcaatgacaaacagagaaaaaactaacttggttttcctgtcaggagcaagcataaactatgttgtatgctatctagctaactaacattcttgcaaatataaagaggcctgaaaaaaattatttggcctctgagagagcatctgaggccaaaaaagcataagtaatccaaataatataagagaaaaattttaaagtacaagatcctgactttaaaagtaaagagggccaaaacttgatccaatggtaaatagagagatgaatgaaaaggcaaaaaaaaaaaagcaaaagtgaagaaattctattggactgaaaatacataataggtaggagccttctcccctgaatctgaaggagaggagaatcataattagattcgtgtaattaagagtgtaggagtataacaaagaaaaagaacatgctggcccactggagacacacattacggatgtgctgaaggggaaataggaagtggccagactctccttgaggaagaaaaaaatgctggaaaggaattgaacagtcctggtagctcaagaatacctaatacttaccgtgggaggggtgttggtatattttggtgatggtaactccttgttgtagaacctaaaggcaaccacagtaaaccaaagagggctaatctttctcaggcatatgcccaggacggctacccagtcatgctgatacctgcagggagactgaggaactatctttgggaataatatcattggagggaaactgatatattttagaaaacgggataattttattgattccctttaggaaaaacgaggagaatatgggagatattaatgaatgaaatttaagttctaaatcatgattttaaataccggaatgaaattaaccaggcatggtggtgagtgcctgtagtcctagctactcaggaggctgaggtaggaggatcctttgagccgaggtgtttgaggttacagtgagctatgatcacaccactgcactccagcttaggcaacagagcaagaccttgtctcaaaacagaaacaaaaacaaaccccctccaaaactagaatgacgtatttcacttaatgtaatgtcctccaggcttatacatgctgttgcacatgacaggatctcatccctttttatagctgaatagtattccactgtgtatatataccacattttctttatccattcttccattaatgggcatttaggttgattccacatcttggctattgtgaatagtactgcaataaacatgggagtgtagatgtctctttgatattctaatttcattttctttggatatatacctagtagtgggattgctgaatcatacagtagagctacttttaattttttgagaaacttccatactgttttccataatagctgtactgatttacattcccaccaacagtgtgtaagagtttccctttctcctcatcatcaccagcattcattattttttgtctttttgataatagccattttaactggggtaagatgatatcactgggtgyggtggctcacacctgtaatcccagcactttgggaggctgaggcgggcagatcacctgaggtcaggagttcgagaccagcctaatgaacatggagaaaccctgtctctactaaaaatacaaaattaggtgggcatggtggctcatgcctgtaatcctatctactcaggaggctgaggcaggagaattgcttgaacctgggagacggaggttgtggtgagccaagattgtgccattgcactccagcctgggcaacaagagcgaaactccatctcaaaaaaaaaaaaacacacacacaaaaaaaaacaggatgatatctcattgtggttttgatttgcatttttctgatggttagtgactgatatggtttggccatatccccactcaaatcttgaattgtagctcctataattcccatgtgttgtgggagggatccagtgagaggtaacataatcatgagggtgggtctttcccatgctgttctaatgatagtgaataagtcttaagagatctgatggttttataaatggcagttcccctgcacacgctgtcttgcctgctgccaggtgagacatgactttgctcgtcctttgccttccaccatcattatgaggcctcgccagccaagtggaactgtgagtccgttaaacctctttttctttataagttgcccagtctctggtatgtctttatgagcagcatgagaacagactaacacaatgacattgagcattttttcatgtacctggtggccctctgtatgtcttctttggagaaaagactactcaagtcttttgcccatttttaaatcagattatgttttttactaatgagttgaattccttataaatactggatattaatcccttgtcaggtgtataattcacaaatattttctcctattctgcaggctgtctgttcactttactgatttgtttcctttgctataaagaagctttttggtttgatgtagtcccaattgtttatttttgtttctgttgctcatgcttttgaggcctagtgtaaaaacatccctgcccagactgatgttgtgtagtgtttctcctgaattttcttctagtaatttcatagttttgggccttacatttgaatctttaatttattttgagttgatttttatatagtaagaaataggggtcaaatttcattcttttgcatgttgatattcagtcttccaagtgaaataagctaggcacattaagacaaatactacacaatctcactcatacatgaaatctaaaaaacttgatctcatagaagttgacagtagaatagtggttaccagagactgggaagaatgtgggaatggaggagatgggaagaggttggtcaatgggaacaatgttacagttaggaggagtaagttctggtgttctgtttgtggagtagaatgactatagctaataaaaatgcattgtatatttcaaatagctagaagagaggattttgaatgctctcacagtaaagaaatgataaatgtttaaggtgatgaatatgctgattaccatgatttgatcattacacaatgtatacatgtatcaaaacatcacgctgtaccccatgaatatgtacaattattatgtgtcaattaaataaataaataatttgattatattcacacacaaaaaaatattgtaatgaaagacaagtctaagatgagagtgtatcttacaaaaaagtataagattgtgtttggctggaaactacttaatgtgattgtggagaaagtaaaataaaaacagaaataaacagagtagagaatggcagttctaatgtggaaatgccaaaccatttctgctctgccctcacaccctccttagaaaaataattttccacagtctgttggtattcaacaacccttttctctccagctccaaatgactggaccaagagtggtttgtgacaccaaagaaagtaaatcataggccaagccaaggcaatcagatgtgggagagagtttaaagtagaggtaccaagactgagcttccaggattggacacttgatctgaaggtcatgtgcattggagataaaattgttgttttctgctatatgcatgccacagcagaaaatgtggggctgcagaagctggagaatggtgcagacacactgcaagaagcacaggagaacagaaagaatgaaatcaatccccaactgtccagatgtcaattgagttccttgcagagctgaactagtctctttggctatatagtctatgacatacccctatagtctctcattaaatgcccctattttaagttcaagttagtctcagtaggttcctgttttctgcaagcaaacaattcttgtctaagtcatatagaaacaagaatgatattgtgattgcagatccaaatcatttcaattgaaataatcattaagacataggtcataaacaattctcatagtctcataatctcagatgttttacagactgacacagaacatgagttataaaagaagtaaacttgcgattgtagcataggatggagaacatgctttcataggaagcaacagaaagaacttggtgggaacgaataagaaagagcaaagatggggctttaaatattcagacatttactaaggatttcattcagctagtataattcttgattaactttggcttcactgacaatgccatcttcaaaagagatgaaataactagaggaacttccactctgaacctaagtcttacagacaaggagaggtttgttggtgaaatgaaactaatgggctgggcacagcggctcatgcctgtaatcccagaactttgggaggctgaggcagtggatcatttgagcccaggaggtcaagaccagccagggaaacatggcgaaatccatgtttaccaaaaacaaacaaacaaacaaaacaacaaaaattagccaggcatggtagcgtgcgcctgtagtcccagctactagaggggctgaggtgggaggatcacc

SEQ ID NO: 95242 - DNA, 43363 bp, Homo sapiens
agagtagatcttatagaagtggcagctcagccttcccactccttgacccttcagaggcccagggctgctctctgaatttccccactctcttgtgcttctcaggaattcaccgtcccccagctccrtggccagcagcgactcaggaagtacagatgagatccaggatgagttcgagcgcgaggcggatgtggagcccatggtcagctgatgactgaggccctgcgagcctggtggtcttggtgatggggccctgccacctctcctcatggggccaggaaggcccctcggagtggggttcgaagccacaccacacagactttctctgccctcccttctctggaggcccygagggactgctgcttccttccttccttccacaccaccaacgggtgccccgtctccatcccccacccacccaaggaatggtgctgtcaatttctattgttctccacattacaaatgcagacttctgtgcggactttgcagtgttaactgtgccttctcccttaagctgagccactttgagctccaaagaattattcctagcaggtgtttttatacagaactctaagctgagggccgggccaaccggccgtggtgtaatgtggtttctgccgtccgtcccacctgctcctctgattggccatgggctatgccctcccttcctcctgagccagcccagactcggcctggagcttggggtgctctgccaacccccaggaaggagccgcttgcctctgtgagctttctaggcctgggtagggaccaccccaattttctcactccctgaaggagagaaaggtggaaggaagggaaggaggacacattttaattttttggggggatcgagtggcaaagttgaagggacaaggcactgtgaggggaaggcagagcctcactgtgtttaaactactatgcaaaaaacaaaacaaacaacaaaagcagcttgccttatatcattgtggaaggcaggacctctcctgggctcctggcttccccctggagctgggagagaggccggggttagggtgatctgtgtggcagcactgactgggtagtgtgggtttggccgaggttggtcatgaggcyggggttcccgcaaggcactggcctccctgaccgcttgcttccttccggacctctgggttcagggcgggggyggagggatccttgatttccctgataacttgatgttcttccctccctcgccagccaacaatagaggcttagagatctgtaatttctctgtgagaaagtctgaaggggccaggcctggtctctgctcccttctacccgccttgggttaggactgtccggcagttgcctgcttttggctgctggcaggagagaagcagggtgggctgctggcagtgcaggagctggagtgagggccatcctctttctgctcctcgacacacgcaagccgctctcagcagttccctcgactggccagtcggggtattgatctgagccagcatcccccaagacttgaatggcttgagtgggactgcgttgaagggcactgtgtggcccccttccaaatctcagcttggagccagctgagcaggctttgctttattattattttttaagcctactgcagtgggtctgttgccaattttaattttttattgtcccaggagctccctctagtggtcaaggtagcaaaatgtgcccaaggactagaacttgggtccctctgccttgcctggaggcagaaggagggggctctgggtttgactgggattgtggtccccaggggtccgtggcctttaaggctcttctctcttttctgtttcccccacctgtgttacagtcttaaaaatactgtacataaaagatatatgtagagagagagagagagcgtgagaatgtgttagtgactatgtgtgatgtaatttatcacgatttggtggccttcgtcatgagttttttcctttgttttcttttgctgggggcacctcccacgggtcccctgtggcagtctggctgtgacacttccatagtcagcatctcttgttagccaaacagttccctttgacaggtacttggagggacaatggttttggaagagagacggcccttctctctcctcactcacccttgttctaaaggttacagggttcaaacatacctgattcttgttgttattgttgttgaatttttattttaaccaaaggttatcagagccagttgggcttggacctcagctgctaaaaagattttccgtttcctcgagggcaggaaaacatccaccctcgtgggtctcctccgtccagggccgagggaggcattggacaatgtggtatgggagtttcgtgggcagcgtggaagccggccctgggttgttccccaaggtggtgggagggtgacagatatatctttagacttaagactgtaaggcagcagtgttagcatgggagtaactaaggttactgtggttatcggtgtccggcggtattatttttactttcctccttgtatacataggtcatttgtctttgaggactagggtactctagggagtttgaaaactgcaggagccagaaagagatcctggcctgagagtcccttctggctggcttttaatatctgctctcctcttgggagtgaggacttggggcaggtgggtaggagagggaaagccagagtgtgatgggcctgcctcctgggctggttcctgggtccggcctgcctgcctgcctgcctgcctctccaccacatgcttttttcagttaatgtcagtgggccctgcttgtcccctcaccatgagcccacagcttgccaagaaagaccccaacgctcgctggggcagcaccagtcctagctgggacgaattggtccatcctttgtaaagctgtaaatacttaattttgactttctatttctaagcccagtgtcatattgacactggtattttagaattttctcagatgggctctcctgcgctgccctctgtctcctgtttttgggggttttatacaaacagaggattggggagggataggaagactagcatccttttggctccctggttggttgtgaaatacacacacacacacacacacacacacacacactcgcactcctctgagactccgaacagagaaaaaaattattggcaaatcaacacatttttctttctcgtcttgagaaaatgtcttgaggtccctgaagggccaaatccatcgtggactaactctgtgggtagagctcagatgacctagggagaattaaaccacttamgcttggagtgggaggagagggggtggggtgggggagaatataagatgtaacttaagctaaatgtaatctatttataaagcaagagactctcatctatttttatgaaaggaagggttttttaatctagggtaggcagttgtggtagcccagcattttcctgtggacgagacatggtgcatgttgttgctggattgaatggaacccattcctgtcccccggcctcgtcttctgtcctcacttttggtcatccacacccatgagcagcttcagcagagtgtaggtcccacttcaccccattctcctctcctctgacccctcagctccttggaagtcttggggtggggatctgagggggtgggtgggctgcaggaaattcagaaatgtggtgggtgggggaagggacaaggcgcattagggagggaacaagctgggctctggggataggctctgattaattagttactctgactctggtctgccgagatccatttccaacccagttgcgttgggagagggttgggaggcagcagagcatgggtgacagtgggagcacacgacttccttggagcctgggcctttgcgggtcccaggtggtcaggcagctggagcaraagtggaaatggcttaagatgctcatagcccagccccggctgtgtctactccaggccaagcctgggctgcagtccttgctatgttccccccagggccctggggggagggatcagggtgctgggggtttcctaggacaggggtcttcccccttgagacaccaagctctggctctagaagagctctctcctggagtggggagtctggaggggactgggtgggtgcaggtaaagccagattctctctggaagggaattttctatgaatggatgatttccaggctcagggtgggctgtgtgttagttctgagcaaatccctcaccaagacccttccctcccaagccctcaaagaaatgaggcaaagcccttccctgcaagaccccttgtggaygtttttgcatctacctgatttttagccccacccagggagactttataccccatgatcctgccccaccgttgctgttgtctgccagctgggtctagcatcacagggaagggggggatttatactcayggaaagactactgatcctaccggaaaccaacctgtttactgtactgttgtaaatatcatgccctttatatcctgtatattggcttcttttaaataaagtgaaatgtcttagaactgatggtgcttttttttgtttttgtttttaaacagaagatgaatctggtgttgggggaggggtaggaggacggaaggccacagaaaccctcaaactcattagttaattagccataaaataggggatttcatatcacctgttacatttgtagctcacaataaaagctttggaagatgacaaagcaggaatcattacacacattttactgaaggggaagagaggacatgagacatcacaggctcagtaactggcttggcctggtttggaactgatgtccttttaaccacaaagcccccatttttccaggctctccaacgtgcccacaggaggtcaccttcccaggctctggatttgacagtaaccaatgttctagtttttcttgtcaatgggcatgttcagggcaacattgcccaaatgtgaactgagcccacctgtctagggttttctccaaaggtgaagacaaatagccgccaccaattccaatttgctttttgccattcctaatacttggcacttaggtaatctccctctcctactcttcatttaaatgtttacattctcccaaagtacctcaaatggtgtaatctggagaaaaataagtggcttaagatcacgggggctttgtgagttgggtactattacttccgttttacagatgaggaaactgaggcccggaaaggatatgtagtctgcctagtgccctgcttgaggaaccaaaatcagcatgggaactgactcctaagcaggtgcgcggttcatgctgctggaagaaatataaacaaattagaacagagagtaaggaaacgtaacattactttaggaatagattgggtccctgagacctcgtcatcagagaagacttcagaatccaagttttaaatagcattctagtgtttaccaagcacacaacattttgcaaagaaagctgaaatttttacttgggggtaaaaggctcaggaacaactggttttgcggccaaaggctttaaatgaaaagctaagcgttggccagctcaggttttatcttgcattgatcgtaatctgcaaggaagctaagaagctggccggccccgcgcctggagggtaggtggagagcggctgggtcctggccaagaagctggaaggcaggctcattccaggggccgcagcccccgggaagaagcagggggctggccgcgctgtggccctgcggggtcgaggagtctggtagcggacaggtttccagccttgtacaagccaccggcagcccgagagaagtcagtcggactcccatcgaacccggggcgcacgccagagggccggacgcagcgagtccttctgccccgcttcagcacgtgtcccatttcggttatctcattggctctattcagcccctctctgctccgctttggaaggctgccgcaggaccgccccgctgattggttcagaagctttggtgtgtcactctgactggtcgacagagttcacgccctctctcccgggtcataccataaagagaggaggggaaaacgcatgcatttcaggacttcgctttcgggttcccttgtcctgtgttgtgtaatgcccccgttatggcactagaaatattttttattagccgaagctaaatatagtgggactttggctgatcccgagctcggaggacagccggggtgatccgtttccccccgaggatcgaggtggtgcgctctggacggggttgtgcattctcgccgcgcccgggcggacgatccagcgaacagccccgcttctaacccgagatgctgctgccggcgcccgcgctccgccgcgccctgctgtcccgcccctggaccggggccgggtgagtgagcacggggcccggggcggcccgagcgcgcgcctggggcccgggagcctgagagtcactgggcgtcccccgcgccgcactccctccctgccggacccccaagctgcctcggtcaacgccgggttcctcaggggctcccctccgacccccacccaggcctttctcccactgagatcccttagcctcctccctcaggtagtcaccttcctttagcgaggggacccctcttcccgaatcctgcgaccgagtagggtgcctcggtggccctgccggttcccacgctcggaaagtagcctctgtagtcactcacctcactcctaatactggatcttcgcaatttgctggcttcccctgaggggcccttctatttttagcacaccacacatctcacttccccaccctcgtctcacgttcagtgtccccatcccgccccggattccccgagtcctctccttctaccaggatttctacctctctcttttccgctccccacacaccccgccgcccgtttttttttttttttttcaagttaaatgttggacagaaaaaaggattcctttcttcttgtaggtggaataatcatatttatagagtgcttataatgaaccaaatgctggccgggcaattggcaggtgtcttatgaggattaaatgagttaatacatggggagtgcactgaacagtgcccagcacaaaggcagcgcccggttattattattgccacgatcatcatcattatcacctctatttaaacttctcactcctgtgaggcaggtcattattccaaataatgaagaaacccaggagcagttcaggggtggacctgcccttcaaatcccgatttgcaaacctgacattgtggagccaggtgcctggacccttgcccactcaatgacaaatattctcagagcccctccagctcggagctaggtttggagaggtaggtgggacacagaccctgccccagaggggttcctagtctggtggggctgcccacctgtggatcagccccccctcccattkgaggtttgtttgcttgacccctggggctgttagtggcagkgtctttcctgatgagctgtgccctttctgagttaatcagtggccctctcccttcccccaagggatggcatggtggtgctctgagcacawgtgagttgcaacactgctgtgtgtcctctgtgggtgaagaggggataggaaagggcgcaggaagaggacatgggacagaggggttcctcttctaggctgagactggggccacacttgccatactccctgtgtgatcccgtttgcaggccttccctgcactctgagactcaggaagatggagcttatagagtcctgtgtttactgagtgcctactgtgagctggtgctctgccaaacaccctagagatgaggggtacccagggaatttacatggggtggggcctttgaggagttttcggcttaataggggagaaatgcataggaaaaccctccaatatctagtagaaagcaatccatattctaaaagataagcccatgataacaataatgattatcaagcaatcaagcaccatgggcctaacaccgagccggtaagtactgtctcattcctgtattatcatgggaaacgatctgccatcagagatatatgactgaaattacatttggtctaaatccagatttatgctctgaattatgaggcctcctgaattgagaggggaaagagaaagagcattttgcagctggttccctgggctcaagttacccctttgatacagcagctggccgcatgccctagacaggatttctcaacctcaccactattcgcatttggggctacattttggttgctgtggagtctgtcctgtgcactgtagaatgtttagcagcgtctctggcctttacccgctgcatgtcaggggcacccccggccctgacaattacgaaaaaaaccctggccctgacaggaaacacaagttcccagacattgtcagatgttacctgggggacaaaagtcacctccggttgagagccagtgctctagaggaacagctttgatgtttgatcacttgttcatttactcagtgaacatttagagcacacccgtgacatgccatgtctgcatttatggagaaacagtcgcagggcattttcagtgacatccctcagtgtcctacgtgtaaaactctagtcctgagaaaaaccgctgcttttgaggaacgggtataggagatgcttcttagtgttttcttttttgccttgagtgccaggaatctctgctagttttaaaaaatacccttgatacatgttttcttttagtttaatacatgtcaactgtgaaaagtacagataaggcaaaaaaatagaaaaatcacctggaattgtaccacacagaggtacccactgttaacattttgattcatgtcctttaactttccatgaatagatatgcttttaaaaaaaacctcatagaaacaagctcatctgcccatactttattgtagcttgttttttccctttatacacttgtctgccttacagtatgttcccaggccctggaactgtgtctggcacctggtaagcccttggcaaacatttagggaatgaatgaactaatcatgtgagcccttccttgtcaatcgatatttatcacggccagcctcaggacaatcaccataaagtgtggcctttataggtgggcccagggatggcagctggtgacaatgactgccatttacttttcatgtggattattttactcagcctctcagcaacctatgatgtaggggttaccacccccatttcacagattaaacaactgaggcccatggaaattaaggaaaacttgtccgaggccttgagctggtgaacaccaggcctcccaactgactgtctctttcctcctttaaccctgacttcctgtttttttctcaatcaactttaccatcagtatcctcagttctctttggaaacaggcaggatacagattaatagccagcccaggcatgtagtaggcttataagagttcacttctgttccttatttcttgtgccaagcccagacatgactccagctcagcccgtctgacatcagggggcttgtgggccggaattggttactaccgtgtcccctgcagtgatcctgggtggttttggactcttctcaggctacctgatggtttaattttcaaaatatcaaaagcacacaatgcttttcctagtctgcccagcccttggatgggcacagcttgccctgggtcgagggctggcatttcccaccattccttagacattctctgctcttgaactcctccaaccagtggctggggcagtgcctttggcctggaatgtcctgctggccacctcggtgagcccatccagtgctttgtggccttggcaaggcagcttctgtcccttcagtatcctcgtctgcaaaatggggatgattgtattaacagccacgtagcaggtggctgcaaggattagcggtgatgtgatcagtggtttcctggatgctggtaccgaatgcgtgctctgtgagtatttgagttggagaataattaaaacctgtgattatcatcacacttctaaagtagtgaaagcgccattgaggcagtgcttggcagtggcacccctgggagcagcctgcctcctgtgccctgcatctggcccggcacacagtaggcgttgaacggttgctgttgagatggtccagaacacagcatggcttggatcctggctccaactcttggcagctctgtggccccgggcaggttactcaccctctctgggctcccttatgttctcatatggaaaataaagatgacagtagtagtcacctcataggattgtcctgcgtgttaaatggtctcatacatggaaagcactttggagtgcccagcacctgaaatgctcagtaagtgctgctgtggttatgatgatccccctctcccaccaatgggcttcctggagtgatcatcttcgatcaggaatatcaagacagcagggcccagcagtgaaggatggtggcaggaggggaggtatggaactcagatgtcctcggtctcttctgtttattccaattaagtaccccagatgccaaacctcttctgttattattgttggtttgtttgtttgtttgttttggagacagagtctcactctgttgtccaggctggagtacagtgtcatgatctcagctcactacagcctcaacctcctgggctcagtcatcctcccacctcagcctcccaagtagctggaactacaggcgcacatcaccatacccagctaatttttgtattttttttttttcgtagagacggggtttcaccatgttggccaggatgatctcaacctcctgggctgaagtgatcctcctgcctcagcctcccaaagtgctgggattataggcgtgagccactgcgtccgaccttctgttagggttttgaccctgctcacctcaggggatggaaaagacttctccctttcttgcagcctccttaatccccaaaccttccctttcctggcagaggtcatggcatggagtgaagagtccctgggctgagctgctgtgccagtggacagctgagtgaccttgggcaagtcactgcccaccttggggcggcggctttcctcaggtggaaatgaggttctagctgtatggtgaggaggatgaacgtgtcccatcagccccacctgaccatgggcctctgagatgttccaggtgcttcagccatactgtaagtctcctgagtaaggaacagctggggtcaaatcctgctctgtcactcatgagctgtgaccctgagccaggagtgagtaactctgaacctcatccgtaaacagatcattctacggtcgagtgtccctcatctgaaatgcttcagaacagagtgtttcgttttttgggtttttgtttttttgagacggagtctcgctctacctcccaggctggagtatagtggccagatcttggctcactgcaaccttcacctcctgggctcaagccatcctcctacctcagcctcctaagtagctgagactacaggcacacgccaccacgtccagctaatttttgtacttttagtagagatggggttttgccatgttggccaggctggtctagaactcctgacctcaagtgatccgccctcttccgcctcccaaagcgctgggattataggcatgagccactgcgcctggccggaagtgttttgtatattggacttgcttggattttggagaatttgccgaacaagttgagcatccctactcccaagttccaaagtccaaaatgctccaatgagcatttcctttgagcgtcacgttgacactcaaaaagtttcagattttggaacatttcggattttggatttttggatcagggatgctcaacttgtcatgcgttcctcatacgcttatgtggtggattcagtgagatgatcctgtctcacttaggttaatgcttggcatgtggtggcaagtgcttgacaaatgttgcctgatgtttgctgggcagtggctgaagcagctcatccctggcattgggtctttctttcttttttttttttttgagacatcgtctcactctgttgcccaggctggagtgcagtggcacgattttggctcactccaacctcttcttcccgggtacaagcaattcctcttcctcagcctcccaagtagatgggattacaggcatgtgccaccatgtccagctaatttttgtatttttagtagagacggggtttcaccatgttggccaggctggtctcaaactcctgacctcaagtgatccaccctcctcagcctcccaaagtgttgggattacaggtgtgagccactttgcctggctgggcctttctttccctccaggccccgccctgggccctgcactttctctgctcacctagtgttgcctttatgtcggtgatagggaggattagccttatcaggctccagataatggctggaaaagtcaggaggctgcatgaagcaaagataatttcctttctatttctcctctccttgtccttggccacccctcaccttagccactggggaacccaaggggccagtgtccagccccaggtgatagcagaagagcactggccttggagtccagtcctgggggcctggtgtcagctctgacactcatgcattgattgtatttctcaggtgcttactgtggccagtcagtgtgttaggcttggggtgcctggtggtgaatgggatgggtacgggctggctgtgtggagcctgtggcctggcgggcacacagatggtcagtcagagctctataatagggttttcactagtgcttccagaaaagtctagagctatgagaggaatccgataggagccccattccggctatgtgaggttggaccagtggaggacatctcaagcagagaggaccccagaagagaccggggtgaccggattgcaccaaatggggcagggtgatggggaatacatttggaggccttggtaaggattctgatgtctttattttagaagaaatgagaagccactgagtagtttctcactgagctccccactgtgccatctctctgatgatcagattttcatgttaactttggttgcggtgtggacctgagtgacttggagactggagcagggctggcatggcgtgagtccaggttgaagtgactagtacctcggacgaggtgtcttgggcaaggtggagtctgggccctctgtgtcttttcagtttttccctctatagatttctgaagctgcattggctggcccrcagctccttgcaaccctgacatctcctggtgcagaaggtgaaatggtgcctggcctttgtagatcagatcccagtacttgcaaccctgacatctggtgcaggaggtgaaatggtgcatgtcctttgtagatcatatctcagtacttgtagccctgacatctccygccacaggaggtgaaatggtgcatggccttcatggatcggatcccagtacttgcagccctgacatgtcccgctgcaggaggtgaaacggtacatggccttcgtggatcagatcccagcatttgtagccctgacaacttccagtgcaggaggtgaaacggtgcatggccttcgtagattagatcccacttgtagagggtgagggggaccaacttgaggtctcaggctcagggcatgagcagaaagggcactgcagattttcagggaaacctgagtcagattcagactctgtcttgtgccgccttccctaagtgggaggactgagggctgctctgagaaaggttgggttggatccatatctgcctcccagagccaggcacttcctgggtgcttggaaaacgcatgctgaataattgagtgagctgttattgacctgatccaatttatctctgcatcgttgccatgtggaataaatgtgtactgactgcataaatgcgtgaatggatgaggaatgctgtcctgccaagaaggtcctcatggatcctcagagaggccccaagtcctgtgactgattcatctctgccttcaccygagcagccagtggatggatactcctgttagcccaaaattgttcatgaaccaaaaaaaaaaaaaaaaaaaaagaaagaaagaaagaaaaaagaaagcactgatgggtgggagtccttaggttatttttagctgcagtcgactcaggctgaactttgaactagtgtctgttctccaggccacactcagactgatggacggacagctgggccagtgcttggagacttccaggcacagggaaagccgtgggggcatgtgatcctgaggtcacagtgggcatctgggcctctgccctgtggaaggaggagggaggcctgcaggatctctgactctgacatttcctgggagggaacggagaaaggagaactggccgctactacatttatttatatattttgagatggagtcttgctctcttgcccaggctggagtgcagtggcacgatctgggctcactgctacctctacctcccaggttcaagtgattctcctgcctcagcctcctgagtagctgggtgtataggcgcgtgccaccacgtctggctaatttttttgtagttttagtagagatggtgttttgccatgttggccaggctggtctcgaactcctgacctcaagcaatccgcccacctcagcctcccaaagtgctgggattacaggcgtgagccactgcaaccggcctactccgttttaacctggggatggaatatggtgctgtgtattcctccagcagttgctgagtacctgggccagtccccgaggctgtgatttttgggggcatctgggagcccatttgtctctgaaagcctgatctactgaaatagcattctgagacctttacagttttctttggaaagcaagagcaggaggggtgaggaaaggccaacacttgtaatcctcctgatggccctgcaaggtgcatcatgtcaaccttaaatagtgagattcagaaagaaggattaagtagtttattcgagctcagaacttgaggatggccaccggggagcatagattcaagttacctcgaatatacactccgattagctgcagtaacaagtgggattttaaggtgcggaggaaagaggcagtttctaagtcatttaccaaaaatttatattaaaataatataagctaccggctgggcacagtggctcacgcctgtaatcccagcactttgggaggccaaggcgggtggatcacttgaggtcaggagttcgagaccagcctggccaacatggtgaaaccccatctctactaaaaatacaaaaaatgagctgggtgtggtggcgggcacctgtaatcccagctacttgggaggctgaggcaggagaattgcttgaattcgggaggcggaggttgcagtgagctgagatcgcaccactgcacttcagcctgggtgacagagtaagactccgactcaaaaaagaaaaaaaaaagctactgatttgctgtgcattgttctttgtgtgacgctttccaggatcatgaagttaatggatgaggcagctagtcagaaacaaaatgccttgaaataattgccatcgggtgtggatgcaaagggcatgactcaggtcccatattcgtgtctccctgggcctgatacattttgcatacttcacatagctcacrctgctctgagctatttttctcttttcggtagtattgtacccattttccaggtgaggaaactgaggctcgcagactttctaagaatgcactgaggtcatggagcaggtgtgagctttgcctccggatttgtccacttctggggcctgtgcttttcccatccactgggacctgggctccaaagaggggctgggacagactcagttatttggagtcccgcttctcggctgaaagagttgatggtgatatctggctcaccatctttggtgggtgtggtgctgttgaggcctggagcgcagcttgaatgcagggtcaggagcttagctgaggtccctgtcagaagcttccagatggtcccaggggattgacactgccttgtcccttcctgagggactgtggagactcgtggctgcctctycattcttctcatgatggtagatggaagagggccgtgcagattttaatgtatttatcgttatcaaatctccatattaaccccatgagggggtgtcagtgttttakggagggagggaaactggcttcaagacatgtgacttgcccaaggtcacacagctagtgggaggcagagtgggggtggggagtgcagagctaccggctcagggtggaggttggtggggaggggaggggagtggagagaaggtcctatgtgctcactttacctgtcaggatcttgggtgccctgcccctgcctctccctctccctctaccacgcaggcccctctcagcccccccccgcctccttctacctgggatgctcttcccagctcctctcaagcctcctttaagtccctctcagggtcacctcctcagagaggccttccctgaccaccctggctgaagcagccctattctcccccttgtttgccatgctcaccatctgcggttaccttgcttatttcctgaccaggcctcacactgaaggtcacctgtgtgcagccaggggcctcgctgtctctgtcactgctttatctccagggtctgagacggcaccagagacccagcaggtcctcagtcaacctcaagtcaagtggaatgaacacagggcctggccacactcctttggttttgtgtccttccttcaggcttcccaggctgggtctttgagccccagactccttctggcccccgacactcatagccgggccagtctgtctcccatagggcaaaaacaatcccgcagaacactagcctcaggccacgtccctctgagaccatgatcagatgagacacaataagccctcttcctgatttttttttttttccttgagatggaatcttgctctgtcatccaggctggagtgcagtggcgtgatctcagctcactgcaacctctgcctcccgggttcatgtgattcttctgcctcagcctcccaagtagctgggagtacaggagtgggccactacgcccagctaatttttgtatttttagtagagacggggttttaccatattggccaggctggtctcacactcctgacctcaagtgatccgcccaccttggcctcccaaagtcctgtgattacaggtgtgagccaccatgccgggccttctcttcatgatttttgtctaagcacggacaaaaacaaggtctctgtgccacccacaaagctctgcacatcttggtaaatgttccttttttcccagtcagcctcacccccactttctgatggcagccaatccagagctaaccgtggcttccttaaaccctccccaagtcaccctgccaaaccccatgggtttcctaacagcatcttactgagatgccctgtggttccctacgctgtgtgttttccctcattgcgccgaccagtgaaccccacctgtgcacttccagctgttcgggttgtctggggccattgacaccagagagagatggtatctgggccttctggactcaagtgcaggtttcccctactcttgatcttgaactagtcattttccttttaggaccaaaatgaccttatttctgtagagaggtggctggtgaggcccgtcctatgccacggtagatgggaagtttgtcaatttcaagtgccctttgggcattagttgactttgtcatcatcattcttctcatttacagagggggaaacaggcctgaaggggaagccccacagctgggaggtggcagggctgaggctccagctctggaatgactgaccccagcgtcctagctttgagccacctgacctcccaccttgtgaccctcagatgtggtagggggtggtggaaagaggtcagaggatttgagcaaggagttcttgagactcagtgtcctggaatcaggcacctcacccccagggccagccctcccggggctgtgagctgagctcarggcagctctccaagttcatggtccacatcttggacattcctgcccagccagagctctcagccctttgtgccaaggggatctcagctggttcacattctgagactgtgttctggaatgtgctgccctttcagcttagagagaggagtttgggtctttttgggataaagcctgccttgtgggagaagaaagggagagtaacgctttgcatgtggaaaatacttcaacgtggttttgcatctgtgtgtttaaacttcaaacaaccgcgtgagttcggtgcgattattcttacttgatagacgtagaaccacgttcacaggaggcaactcacaggctcaaggacacacaaccgtgggactgggacttgaaccttgggttgtggacccccaaggtgggtttttgttgttgttttgagatggagtttttcgctctctcacccaggctggagtgcagtggcacgatctcggctcactgcaacctctgcctcctgggttcaagcaattctcttgcctcagcctcctgagtagctcagactacaggcacacatgccaccacacctggctaacgtttaaaatatttttagtagagacgggatttcaccgtgttggccaggctggtctcgaactcctgacctcaagtgatttgcccgccttggtctcccaaagtgctgggattacaggtgtgagccaccatgcccagcccaaggtggggttttgaccccccactttctagttgcattggatttcaggctctgggtgcccacctaggaccccctgtcggaggtagaggggctggggtctggtggtggggccgctgctgacctctctgcctctgtcccctgcccttgtgttccagcctgcggtggaagcacacctcctccctgaaggtggccaacgagcccgtcttagccttcacgcagggcagccctgagcgagatgccctgcaaaaggtaatgggagggtgggaggcacccgagaggtgcagggcatggagcagaggccatccccagcagccctgagatagcgcyccgtgcctgcagccatcacccgcttctacccttgctcccagccttgggtggaagcctgggagggctgtgggtctggagtgtgggaacagctgggaggaccaaggtggcagcctggagctactctggggcttctcaggccaggtcagatgtcataaacctagttgttttatagttaaacatgttttccagttaattgccagcattttaaaaatcatgagatttcatataagtttcaggtgcagtttttttatctctgtgtcatgggtagacctcaccttcctgcagggtgacaatggctggagcagagtccggctgtccccgagggcagcacatgttctctgatggccaccgacctggcctggcccccttctcatttctgtattgcctgggcacctccgtctgtggactctgcgttagggttttagatgggaggaagcgaggaagksggtgaccatacccactcttgtccctctccccaggccttgaaggacctgaagggccggatggaagccatcccatgcgtggtgggggatgaggaggtgtggacgtcggacgtgcagtaccaagtgtcggtatgtccagcgggtgggcagrgctcagcccctcccctgaatatgtgacctctttctctgacagctcgtaagcttataatgtgtgggctctgacttcaaggcctttatagtgcccctccccaccccagattttgaattctgtggaccagtaaaactcccaaagcaaaggacggcacccacactgcatccagcccatagcggcatcctgtgtctgggcaagaaaggccatgagggggccacacagcatcttctgttattcctcatagatttcttgccaagggggtttgggagctaatgacaaaaagctgggccccgggccccgagcacctcagatggcattggcctaagaagcccccatgcttggagtttatccatccagaaactggcatgcactttacgtgggccaggaaactcayaggtctgtgatttgagggagartaaaaggtcagcccttttgcaaacagggcaagcacattctggctctgtccggctgaaaccctgggcagacgtgtgcagggggaggggtgactgagggggaggacccaggtcccccactctgaaggttcccaggacagcctggggcaggagttgaccacagcagtgtcctggagctctagttgctgggtcaggactacctggagctgtccaagcatggcctggggtctgcaggcattggccaggtcactctgtctgtcactgggtgtgtgtgcaggtgccagctgacagcagcacctgccacccagctccctggttgtctctgtagctgcctagagcttgccctcacctgtagctccrcaggcgtctgaggctgcatggcagctgggatttttccaggcagcgaggctccggcattctgataagcccctgggtggatactgctgattttcatttcccacattgccttgccgacctggctggagattctggccatgtgctgatcactgtggcacgagacatttggggttctggggcatgtgagggcaggatctatgtttgccgggacatagtgctgacggggttctgcagtccactggggcccaggtcgcagccaccttctctgcccttaagcatcacaggccaatctcaggtgtggcccgaatacagagtgactgtgccaagctttaacatgaaggagaatggtcactttctactcaagcctagaccagcgccggccagtagaatttcctgcagtgaggacagaaatgttccagatctgcattgtccgttccagcggccatgagccgccacgtgtggttgttgagcatgtgaaatgtggctcgtggctactcttttagacaggaaagctccaataacccaccagaagacggataggtagcaaaagtgtcagctattacgatataaactatcttgccagccctaggaaggaaagaagtgaaatttctccctgcttcattggtcatgctagcgttcaccactgccgggcattaggttttgaagggaagacaggggttaaagaaagacacacacacagagagagggcagctgaaacagcaacaccagtatattgcagaaacctgaggaagtgggggaccagcttaatgccagggcccaccgctgcttacaggctgaggtactcatcggtatgggtgagacgggtctgggcagtatggcttgctgcctggcaggatattgataagatgttgttatgatcaggtggtttggccctctccggtgggatgtcatcgtggtgttccttgtacctttacccagcaagatatgatagggatggtttttttttttctgagacggagtctcgctctgtcgcccaggctggagtgcagtggygcgatctcggctcactgcaagctccgcctcccaggttcatgccattctcctgcctcagcctccccagtagctgggattacaggcatccgccaccacgcccrgctaattttttgtatttttagtagagasagggtttcaccatgttagccaggatggtctcgatctcctgaccttgtgatccgcccgccttggcctcccaaagtgctgggatcacaggtgtgagccaccgcgcccggccaacagggaagtttctttaggtgggccttcgtccgccttgcggtcaggcggctgagccggatggttctcatggcctgagctcctgtgaaatgtttcacttggcccgaggtctgcaaaatagcggggagctgacaaaatggtgcggtttggaccaacaccaggttgtgtttataaatgtttgttgaggatcttcctatttagattagtaaatctggggcttaggaaacaattgctctgtccatgatggcttcggggcagggcggaagtcccaagcatgtcacaacaccggtgcattcttttgggcctcacctggttttgttgcccatagtcgcagcctcatactggaccaaagaattttcatccatgatcccctttggttctcctgtccatgctaagagacagggagggcagtccccatttcctagatgaagagacttagggaaggaagtgagcttacctggggccccacagctagtaggtggcagagccaggattcgaacccatgtctctctgaccacaaaggtccgtgctttcctggaaagaccctggggtctatgcctttctcctggactctgagccttctggagaaggagccatgtcttactcatggtatagcgggtacaccagcacccttaacagggagcaacctgtgggccgggcactggggagggtttcatgggagcgggggaggggggacagcaggcgtgtccaggactttcctggaaaaccggctctgagtccagtcctcttcatccttatcctggcacctccctcccgggcaaggacctcaytcttctctcctttcagccttttaaccatggacataaggtggccaagttctgttatgcagacaaggtgagtgagcctgtgtgcctggtgacccggggttagggttgctgcccctgctctgccctgccagctgctgatatggygggggcagggggcatcagttgctgtgtccttctttggccatggtgggtaggtgggcagggggtggctgacactgagggagtccctgggtgatgtctttgactgggccaggcatacaaaggttaacttgagccaaacacaagctgcctcagccagggctgagacattcccagacatgcccattgtggtggggcagaccttggactggggaggaggtggattctggaaggctgagtcagggcaattggagacaccattgatggaaagctaggccaagaattggcactggaaagggccagcaggaggggctggggtggctgggggtccaggaactggcattgtgtggcgatgagggcagttggggtctgggaggccagcagcagagccgtgtctcaggctccagttgacctcaagtttctggatggtgggttaaggggcaccaggtcccaagaataaggtaaggttttgattagaccatgagagaaagtggagccagtgtaacagctgcgggactcagtgccaaggcctcggagagctgaccaacctggccgggcccttcaggcttcagactggcagccactacaggctctgatgggacgctgttgttggcagctatggtggcagggggctgagggcccagggagacaggcattgtccccggatggaagagagtggcctcccaggtctctcctccctcgctcactccccagggcctttcccgctgcaggtggcagtccccaacctctccctctccctttagagcctgctcaacaaagccattgaggctgccctggctgcccggaaagagtgggacctgaagcctattgcagaccgggcccagatcttcctgaaggcggcagacatgctgagtgggccgcgcagggctgagatcctcgccaagaccatggtgggacaggtgaggtgctggtgggcccgggtgggtggggcggggtggggtgggagtcaggtgtgccctacccatggcagcagacatcagctgaagcgcttctgggtcctaagcccttttggggacccagagatgtcctcaagggacaaggcctaggagctgggatggatgatcacagattattaggcgagacagattgtgcagagcccatgtgtcctgcctcggaaatgtcccctctcctccatccctctgtcctcgctcctaggcctttgtcatgctttgcctggactggtggtggcctgcactgtctccctgcctcctagcttggtcagcccctcgccgccctcagagtggtctttccaacacctccaggatgttactcctggcttatgacccacccagacctctccaccactgagaggcaagtcccaagacctgagccccatacccagggcccttctgcccacctctgtccagctcgcccactgctctgcatttccctgccaagctgtcctgcccatagtgtagccatttggcacttagcaggactccccggccatggcaggcatcctctctgcctctgcccacgtgtcctcctgcctggaatgcctgctgtctcttccgtgctcagtgaactcttacctcctggtccagcccagatgtcacccmctccgtgagacttcctgagccttctccagccgaaaggactattcctgcctctgtttccccagagcatgttgttcctgcatcagttacagctcagattgcactggagtgtattgagttcctaggtactgcccctttacaagctttttggacatagtaaacatgtcttgacattctcggtctttttctgggctttgcatgatacctttcaggaggcatagcaagcccctgatcaatggttttctctgcacagagctggcatgacagctcctcaccctgctaaatgcaagttgagtgaggagtggctctagcaggcagagtgtgcgggggacaggagtcgagggagaaagggttatttcaccacctccaggacctgagccctacgctgccaactaacctgggttcctgaagggtaaattgcaggagccagaacccaggctgctttctggatcaggcatttgccactgcctgctcctcggtccccatggtgagcrccccctctgctgcacagagctggtatgacagcccctcakcctgctaaatgccttcttagattggctcagcagccctctggggtgggcgtcagctctgcgtgttcctggtgagccgcacgttgctgggaagacagtctaggatcagtttaggctttctctgtatttggcctaagactcaggaacttctaggaagcaaggtacacatcttagctcagcttcatgggctgtgtgtctctaataggtcgtgcacctgccagtgaccttgggtgccaagaggaggccacgtcaatctggaaaagccccgttcttggctgtccacagttcttttccctgcagctcacatttgctgttattaagaattgacggtttaagggaatcacagtcactcgcctcttggtttttggcccaaactaaccagcaaggccgaacatcattcctggggaaggagccatccacctcccacacaccgagtctctctcctggttttccagtgaccaatctccagctcatgctaatctgcccttctgtctggaaggctctgatcctgaatttagtctgaggcttgaccatagatcctttgccatgcaccaccattcagagttgctatgaaatgaagacagtgcatggcaagtacctggcctgctacagaggatcactaaaattcttctgatccccgtccagcccagagggccggctacaggaggtgctagctcaggggcttgagaatcctttccccctcagcccctgggatgggacctggtgagccctccaaatgtttcctggtccctcctggggccyggctcagtgctcgctttgggcacagcgtcagatgtgagaagaggatggacaggaggctgttggctgctcctgacccccggccctctgccttgcagggtaagaccgtgatccaagcggagattgacgctgcagcggaactcatcgacttcttccggttcaatgccaagtatgcggtggagctggaggggcagcagcccatcagcgtgcccccgagcaccaacagcacggtgtaccggggtctggaggtacctgcaggagrcagtgggcgagcaggcggggcagcccaatgccatgggcctgatctcaccgctgcctccttccccagggcttcgtggcggccatctcgccctttaacttcactgcaatcggcggcaacctggcgggggcaccggccctgatggtgagatgtgggcacaggtgggacagcggcagctggttgtcctcctggtcccaacagacagacagaggccaccccgagccccttgggtctcagcctagtcatggggagaggcacagaaggtggaggcagcttggggctgtgggtaggctttgggaccagagacccagtttgaatcccagcgtcgtgcctctctgcctgggagaccctggcaatccctgaacttctctgaggcacagtttcctcatctgcaaagtggaaataataggaaagcctccatgactgggttgtgaggctcaaatgagacacatccagcagcaggcagggctggcccggagctggctgagtgttggtggctctgttgatgatcattaccgctgaccttcagtgctcaccacgtgcctgctgctgtcaagcacggcatggagatgatctcatttcatcctctcagcagcttcgagagggagttgtgactctgcctctttgccagatgacaaaactgagacacacagccgtgacttacttggcaagactgagtgactagtaaataaatgatggagcagagaaagatttggatgtagtctctctcggggttgatggtattcaagtcactcctctgccattatcggagtgaggttggctattactggatgaagtcccaggcctgtgggggaggcgcagcccagctcccagacagcctgggtgggagaggtccacatagttgtcgggaaccccgagccccagacaggggcactggatgctgatgccggagtgtgtactagggacatggatggggacgtcctcatgcatctgtgcacagacaaacacggtgcatggccaggcgcccacgtgcctggctgctgcacatgcctgacccaggacatgtgctgagagagcccgtgtgtacttgccccgccgcgcccggtgagcactcagtgactctagcagtaagaacagacctgcctaggtgatggcaggaccggttggtgcaggcttctggggaaagggagccttggccagagcgtggggcagattgggctgtgccgtggcctccttggcagggacttttggagatagggccagacgccttggaggagtggggtcgggtaggggatgtcctggttggcacagagtctggtggttccaggtgagggacaaccatgctgtagggtagggtggggtgggggttgggggctggtggcgccatcctcatgcatcactgaaacacctcccgggcagggcaacgtggtcctatggaagcccagtgacactgccatgctggccagctatgctgtctaccgcatycttcgggaggctggcctgccccccaacatcatccagtttgtgccagctgatgggcccctatttggggacactgtcaccagctcagagcacctctgtggcatcaacttcacaggcagtgtgccgtaagtccctggggatggtgtaggctgtggtggctaggggacgttcacaggcaaccctgctcacctgctgtctgcctggggatggggctgtgaacccaggggtcatgcacggactctactcccttacttgctgtgtggctatgagtgagccacttcacctctctgagcttccatttcttcacctgtacagggagtgattatccttaatttgcagagtcattgcaaggattaaacatgttaatgaacaggaaagagcttcgcagactggaagtgcaccctacagctgtgggtaatattgatttcagtgctacctctgctactggaaagggcacaggggagcacagaatgaactggaggagtcaggaagccttcctggaggaggtgacatctaagcagaggagttggccaggcagaggggaagaggcaggagaagaatatatatgttgggagagggaatagcacatacaatgttgccaagccaaaaacttgtgctctggggcatggcaggatcctgtgtggctggagtgtggagtttgggggcgacagggcaagagagtgagggcagggcatggtttgagttgaggtaggggaggcaggccactacctgatctcgaccatccatgcactcactggctgagcaggaaatttggagctcacactaaggctcagtggtgagcacacaccagggacaaggtcccggctctcaggctggaggtggcggcagggagtggttcagtgaccataagatacttaggagtctgcaaaggtgtctggcctttatcctgaaggtgatgggagccatggaaggcttcaagcagggagagtggctgagtcagagttctgtgtcaggcagagattgcaaataatggcccccaaattggatctggcaagaggctctactttctttgactcctaacagtgatggcccaactttgtataattgggacaatttcatagataaatccaaatattggcctgtcttggtcccctggacctggatgctctgatcttgcatttcctggtggtaccactggctggaagtgggtgggtgccctctggctccctgcatacctgatccacgctgtttcctttccctgctggctcctctgggcccctgtgttggcaccctcattctcagtgatctctctgtgacctgatgcaggagactggccagggactgttgacctccagggaggggtggtaggggcttgaaccaggggagagatgggggatgtggagaagggggcaggttcaggtgagaaggatgcagggaggcacagtggccattgcctgtcctggagttggggttggggtgcgtgtggggatgaggggggttgtcagcgagaatgttcaagatgggcacctgggagggcgagcgggctcgggggaagatgaatctcctgttggtcacttcgggtgttatctgggtggagatgcctggaggcagccagacgccgggtctgcagctcagggtccttcttacctcctcttccaggccccaggctctgccacccccttccccgcagctttgctgggggtgggagtgggtggtggcagcgttagaactgctgagaagggcygttttccaaaaggcctgctctgccagccacgggcccctgggctccccgcctatcagcgggcggagcgggcctggaccccattctccacgctctgatgagcagcgggsttaaaggtgggaaggccataaattagtattagctactgtgtcgctggctcccgggtgattagcatttttattgttttgtggtgctgaggttggtcacacttggagcctggggaggaggcgaggccctccagggtggtggcttcgggcggggcctgagctccctctcccaggactctcctyggtttggcctctcaggcctgggcgctgggcttgggggggatccttcgcagaccacagcggggtctgttccctgccaggtacctgcagtgtgcccagcatgtcttaagcacatgcctcacacttgaactcatcacaaaacaaccctgccaggtcaggattgttctccctgtttcccagatgaggtgcagaattcgaggctcagagaggttaagtaatgaacccaggatcacacagcccttagtgtcctcctggctgcagaacatggacctcctctgcagcatcttgctgcctagccccccgttgcccgctccccgtagtcttggaatgcagcctgttcccagccgccatccccgacttggctcccacctcctgctgggctgcccccggcaatgctcctccctgggcttttccgcccccttcctctggcctggctccctgaaccccaccctttctcctgtggttccagcaccttcaaacacctgtggaagcaggtggcccagaacctggaccggttccacaccttcccacgcctggctggaggtaaggcctgcctcacctcctcctcccgtgtggccccagggacccctcccctggccattatgaaagaggagggaggtagaggggatccagccacaagtcaggtggatgaaccatttcaggcmccagcactgcccagtagaactttttgtsatgagggatgcgtccagtaccttcactctccaatatgcagccaccagccacacatggccatggagcccttgaagggtggcctgtgcgactgaggaactgcattatctagttttctttcattttaattaagttawatcttagtagccagtygtggctggtggctgccgtgtcgggcattgcagctgtaagcggaggcaagtgcaaatgcagagaccagaagtgggaatgaacttgtatttgaagaaacaaagcaaggcccatgagtagggagggaggagggctggtaggagaagacgggctgagacgtaggcagggctggaccttgttggcatattaaagttttcccacaaagaaacagtttcatggtcaaggaaatttggcatgtrtggtgttaaagcaaaatggactcctcccgtgcagaacttctcagagccttgaatgctctaatacgcatggcacatcttcaaggacaaggtctgccatgtagtgtttcccacacgcattgggccatggaaccccrtttctgcaaagacccccatggaccaagtgttttgtggagcacattttgggaatgtgctgaggcctagagggagggagagttgcagccagcacgtgaccagcagagctgggaccggtggtccagcatgtttctctgtggcgtgaattggggcccactggggagtctggaccctgttcctggactggtgggagttcggatgggggtgtcagggaaggtgagcgctcctcagggtcagctgtgtggctttctgctctcagagcctccttccctgcctccctgagggagagaggccgctggttaccactttccaacctggagcaggtgacttcatctctctgtgcctcagttttcttggcttgaaattggggatagtaatgggaggttgttgtgaggctttggtcagacaaagcacagcgtacttcgtccagagttgggcagctgttaagtgctttcagctgctgttagctgctgcttcccayggagggaggaaactgaggccgggagagtgaagtgacctgtctgaagctccctcccactggggaaatgggggagcggtttccagcacgcgtggggaggaggggcccaaccctggcagccgacatagggtaggctccaatgtccctcgtggacgagggctcaggagaacctcacaaaaagctgtgcccacttctgggaatggctggctctcgggggccttgggttctcatctgtcctctgctgttgtgttgggtagtttcagttttcccatcagtgtaatggggctgttggacctgatcacctctgatgcccttcacccctccctgggcctcagtttcctcatctgtggagtgggagaatgggcctggcccgtgggtctctgggatgttggccagcgctcactctgagcctccgcccgctctgggctgctccgtgctcgtgttggtcccgggccatggatggcgtaggtggtgctttgggcccctgggcaacygggggagccagctcctctggtcatttccccacccccgacccctgtagagtgcggcggaaagaacttccacttcgtgcaccgctcggccgacgtggagagcgtggtgagcgggaccctccgctcagccttcgagtacggtggccagaagtgttccgcstgctygcgtctctacgtgccgcactcgctgtggccrcagatcaaarggcggctgctggaggagcacagtcggatcaaagtgggcgacgtgagtggcaccgtcacccccgccgcggcccagcggggggctgatgggattgggtccctgggaggctcctctgcagccggggctggggtgtgcggggaggggtctcccttggtctcggcctgcagtgactcgtctcttctggcgcctcccttgcctccagcctgcagaggattttgggaccttcttctctgcagtgattgatgccaaggtacggggtgggaagtgggcgttcctgggtgggggcaagccctggagtgggtggaagagggaggaagagatacagggtaccctgacccagggcatgacccagccccactgctttgatcaaggcagctcagcagccacacacgcacctccagcttcagaaagggcagaatcagccgtagccagacaagagctcatcttgcggccaccctggaaccaggctcagcgagctcctaatagcatttgcatgagtgcatgtacacgtgtgtttgtgaatgtgttcatatagggctccgtgtggctccacatgtaggtctttccatataaacaygtacatatccatttgcacataagcacacacacgcatatgtcrataagtccacccacacgcatgtacatggagaaggcatgcagatccctacatgcttagacatgtgaccatgcatatgcctatatatgcattgattgatgtgtgtctrtgtttatatgcgagtgcacctgtagtactaacacacgtacacttgtgtgtgtacacacacacacacacacacacacacacacagtgttcatgtctgtccttgtctctkctgtggctcagccagaccctggcttttgcccttggcgtcccctacccctgcccctgtttcaggagttgggcccttcaggtgcaggtgtttcggggtgagtgtgttgtgggggctgccgcagggatgccttcccagcctcttagacctccctcctccctgcccaccccagtcctttgcccgtatcaagaagtggctggagcacgcrcgctcctcrcccagcctcaccatcctggcygggggcaagtgtgatgactccgtgggctactttgtggagccctgcatcgtggagagcaaggaccctcaggagcccatcatgaaggaggtgactggggtgggcagcctggggtccagaggaggacartcccaccggagcacagcacacacacagttctcctggagacattctcccatttcacagatgaggccctaaagggagaccctaaaagggaatgcctccgaccgggagagagtagagccaggttttgagctcaggctgcctaactccaaatccggggctgtgtccttgaccctggctggggtctgagcatttccagtgccctcagcaaccacgtccactgcagccatcataatggctgacactgatagacttttactgtggggccagctgtggctgagcacttggctgagatgacgtgggtgttactgttcccattttacagatgagaaactgaggtcaaggcacttgcccaagttggtagtgcagggctggagtgtgcctgagaagatcttccccccagccccttggtggcagagggaaccatgaacccttctggagggaatggtatctctgggcaactctcatgccagctgctgctggaagcctctgggacctggacccttagttctccgggtgtgggtttggcagggagagccagaaaatgtttgcatcttttgccggcttgtggtgggatggacaggacagggagctgggcacgttgctgtcctggagggaacccaggaggaggcgacacctgacccttcttgcagacactgaagtgtaaactgaggcccagggactggggagagggtgagccagagcaggggcactgggagggctcagggccctggtccctggtcccgtggagggtctgacgccggggcctctctcctaggagatcttcgggcctgtactgtctgtgtacgtctacccggaygacaagtacaaggagacgctgcagctgrttgacagcaccaccagctatggcctcacgggggcagtgttctcccaggataagtgagtggccaggccgcagccctggtgctgtgctccgggtgtcctgtccgtgtccccatccccacctcctggacgtggttcccagtaataatgctgcccctaccttctctctgtcccctcccctcagcccagacaggcagccagggctcgccacatgggcccacagcagcaggctctttgttgccggtactggtggtgccggtgccagggtgccactggggaccagtggatctgaacctctaggggcagggctaggaattggtgtcttcgactggctctgcgggatctggtgttgccccactgagtgaggtgattgtcccatgctacaaagcagggcaggccaggggctgcagaggcaggattcgaacctgggtcacatgaggctaaacttgaggcttcgcctcttctttcctccgtggcactggttgcccccatgtctgcctctatgagaaagtggaggtgagcttggagagggaggaagggtgtgggcctgggagctggagtttccsctgctcctgagggacaggaacattggaccaggacaggccactcccttcaacttcgcagtagccctgtaacgaggcgtgccaagcccctccccagaggaggaagctgggctcagagactgggtaacctgaccgaaggcccacagccaacagctggccagcatccctcatccctgactcggcctcstgttgaacctggaaagccagtgtgggctggagcagggstgttgaggctggagctggggctggaggggagatgagctggttgctctgtcaccactgctctgctttgtagggacgtcgtgcaggaggccacaaaggtgctgaggaatgctgccggcaacttctacatcaacgacaagtccactggctcgatagtgggycagcagccctttgggggggcccgagcctctggtgagtgggtcccccttcccacaggggagctgagttcctggtgggagascctagatgttacrtctcgaggggcttcagagtaataggaaggataccatttactgagcacttattgtgggccaagcaagtgcactagctcagggtcctttcagcaaactcgtgagcaaagggactattcttcccattttacagaggaggaaactgaggctcaaggccacatgaccctggtgggattgtaattttggctccagcagccgcactttctgcaccatagccagtgtcccttaagtccaacaacctctacttcacaatggggaactgaggctcaggaggagcaatggcttgccaaaggtgactgctcctgagtggcagagccagggctgaacccaggcgtgctggggtttcccacaccgaccagttctccagctcttgatggatgctggctgggtgtcctacagtttaacttgatgctcactgcctggggttagtgcagaccccacaggttaagaactcagtcccgtaagactgaycccccaacttcagatgccaatcacaagtactgggaccccaggttacccacaccttgtctgactttgcgaygcattagaagctcccatgatgccctcttgagttttgatacgttgttagaacagctcacggaaccgaggggaagcgtgcttactattacccatgtattgcagagggtattttaaaggatacagatgaacagccagatgcgcagacacatagggcaaagactggaagggtcccyggcakgggcaccgccgtccccctggagttcgggctgtgccacccccttggcatgtggacgtgttcaccaatctggaagctctcccgaccctgtccttttaggtttttatggaggctgcattacacaggcacgattgattcaatcattggccattggggtcgactcaacctccagcccctctgccctccctggggctgaaggttccaagcctctaatcacagggttggttcctttgccaatcagtgccatcctgcaagagccctcattagcataaactcatgtgtgattagaaggggcttgttatgaataacggaagacactcctttcacccccatcactctggaaattccaagagctttaggaattctggctaggaaccaggggtgaaggctagatatgtacctcttatggcaccccaggaccatgccaagtccctgcctctcagtctagtgttctctccaygccacaccctgcctcttagacatcctcgcatcccagcaaggatgcaaggctgggtgcgactggagagaacaatggaggctccccacagactggagactggaggcagggtctcctgtccatccctctggctcttctgcatgccccaagcttggcagcaggctcgctgctggccgctacactgctggtccgttgattccatcatctcctcccttccccttctgcccaggctgttgcaycttttcagagaaawacagaagtgtcttttccgcaggaaccaatgacaagccagggggcccacactacatcctgcgctggacgtcgccgcaggtcatcaaggagacacataagcccctgggggactggagctacgcgtacatgcagtgagcccctctcgggctccaccgtccagctgtctgtcygtccaggtggccgacctcactgcacagaccccactccagcccctccaccccttcttcatgcacagctgcctttctataatccrggcytgactcccttcttaccactgtattctggcctctcccatgcctcaggctctggtttgagatcgtgctggggaggaacatggccactaccccttatcccatcggccatgtgggaggtatgaccctggtgcctggcaggttctccctctgccctccactgggcccagtggctcagggacctggggaaaggagatggagcagctcttgggatcctttggggaaaaggaggccattctgggccccttggcaaacctcaccactcacagaggctcctggccttgatccctgcccctccaggtgtccagggtaaagtgtaactcagacygacctgtggggcacagggggcaccagctggccttgccctctctggtctgggctgtctrccttcctcactgtatctttgcccagacccacctgggccagtaggcccctgtccccagccacacaccttagatgctggcatgccttactccaggtgcctgtgtttggccgaggcctgtgtgattcccggtctgcaccacatggcggggttggggggccgctggaggccacctgccaaggcgtgggatgggatggtcctgccggtttaggcygtgattctggaaaaccttggatgggccttcgtcctatgtcagccttccctytgatcctcaggccctacctgtagagacctccactcctagagccagtctcagggtctgggatttccctgcaggagctcagccaccactgtgccatggtgacacaggccaaggcagacattggccctcccttctcccagcccccagaggcctggccttgrgttygtcagcatgggccgaggacgttgcctgtagaatcctcctctgcctgggagtggctctgtgtggaccagtccctcactggcccattctttttttgacgcagccaatctgtgaccacgattcctcccacagatgcctcctgcttggattctgagtggtcagagatctgtaaagcatgactttcaaggatggttcttaggggactgtgaaartgttgggtcttcctccaggatgcctgcatgggaccccacccggagctggtgtggccattcccsragtgccactggcccatggatgggggtgggtgctggtgccasctgggctgggtgtgggttctgtgtccttccaggatmtgtgtcatttcccatgaggggccggggcaggtggctgggtgggggcacaggctggagtattyttagttctactggttctacactgtgaggtggcaatgggatttgctcagatgccacccaataaaatgcctgttacttaatcacagtggtggatggtctttctggaggggatggtgggggcagccaacatcttttaagtctggtgtcattgccaatgtgtcacctggtcatgggcacagtgctctcagtgtgacagaaggaacagtaggtgctgatgtttgaaattgtctgttggaggcggtggggctgggttcacatcctggctcactgcccccccgccagccagatgattgccacaaagttatgcaacctctctgaccttccatctcttcatccataagatggggtaaccgccccctctccccgccatgggtcatcatgagaattgaatgagttaacacttccacatgcttagaatagtgccagacacatgatgattcaaaaatattacccataaggccgggtgcggtggctcacgcccgtaaccccagcactttgggaggccgagataggcggatcacttgaagcctggagtttgagacctggctggccaacatggtgaaaccccatctctactaaaaataaaaaaattaaccaggcatggcagcatgcacctgtaatcccagctacttggggaggctgagacaggagaatctcttgaacctggaaagcagaggttgcagtgagctgagatcacgccactgtactccagcctgggtgacaaagtgagactctgcctcaaaaaaaaaaaaaaaaatacccgttacccattttcgttgtaagaaccactatcctgtgtggtgatggttaattttatgtgtcactttggctgggcatggtgcccaggtatttggtcaaacattctgggtgtttctgtgaaggtgtatttggatgagattaacatttaaatcagtggagttttaaaagtaaaaagcaaggcaggtgaccgttcatcctgtgggtgggcgtggtctaatcagctgaaggtcttcataaagtgaagaatgagctctccacgcgggaaggaattctgccagcagattccccttgcactgaatcgctgcagctcttccttgggcctccagcctgctgggctgccatgcagattttggacttagtaagcctccataatcacatgagcaaattcttaaaacctctctcttgctcctgttctgtgtctctggaggatcctgatgaatatgtgtgctgaaggcccagtatgtttccttacaacagcctttggaaggaattctgccaccctcccattttggagagaaggaaatttaggtacagaggtcaggggccttcctgggggtatggtattgctgagacgtaaaccctggtctgttggggaaggattcgttcctggtacagccacaagaaggcacatatgactgctgtcttggaaagacacgctcagctggccaaacgatgactgagaggagccactgcagccagttagcttgagcccaggtctgtgggccctagcccatgcaggccaggtgacttgtggaggggtggaaacatgtgacctggcctgttcccacctgcccatgatgtaaaaggggctgttttgtaaaccacactgacacctccagggacaataggcaatacccagagtgccccaggctggagcacagaagggaagggtggcaactgcatttatagtcgtgggaccagcaggctgtggatgtgtttgaaccattggtgtgacttgcttaagatcacactgagacagagttggctaattactaaatgctttacctacctggtcacttagagccttggcagtgaccttaccaggtaactgtggcaggacccacagaggtcagaggtgggataactagctcaagctcacgcagctggttaggaggaaggctcgggcttgcacccgggtctgcagctgcccacggcccacgctcttcgccacctgctccattgggctcctgacttccaagctcctcctctcctaatattattttatccaaccttcctcaacctgtcacctttgcctccttttggactaggggtgactcaaagctgttgcttaccctgttctctctcctctacctcgtcccctagacttggggctggtggctcttgagggcccagtgcctgctcggggacctgaggcctctttgcatggtcaccacaataagtccctgtgtctgcgktggcccaaggagccccttcatttccctgctgtggccagggccagggcttggagcgtgaaccatttgactgaggccggatgtccctgccaccactgtcccacgggccgccagtggagcatgccctctaaggaaatgaggggccacctgtgctggctgcaggccaccaggctgacccagagctcctggcggggggagtcaggggaagtggcaggaggcagacccaccctctccagagagtcttcattttcactagttcgtccccgacccattcatcgtcttacttcctgggtgttctgtttaggggccagattagtaaataacaagagccaccattgtttgaatgcaggctgtgtgccaggcattgggctaaatgcttcgggcatcatggcctcggatcctcatggaagtctcataaagtaggtgctgttactcccattttacaaaggaggaaactgacaccaatgggttaagtaactaacatgccagtaggaaatgaacaaactgggttttagtcccacacctctgactcccaagcccctggccataaccaccactgcacagtgccctggagctggacaggcgctgggctcagatcccaaccttagcgtcttgttcctgtgccttgacctcccagcttcagactcctccaggagctgaggaccaaatgaaatatttaaaaacaaaacgctgcatcccatggcctgccagggtgaggtgcccaatcaatgtgaacttttaattttcaacctcaacacttcttcatcctagatatgtgtgttccccaggaaagaggagaagccagatttaaatgagcacctatcaataggccaatcgttcctacaaattctcttggaccacaccggcctgtgagatagtattttagcaccatttcacagatgaggactgaggcttaaagaggtgaagagagacctgcttagtaagggacgggggcaagagaagaacttgtttctgatgaacataccagcaaccccttgtcattgtccctcacaggaatccatccttccgggtgttctgtgcatgggtgggaggaggcactgctgctgtcatggctctgaacacaaccagccagccttgtcctgtgtccggggggctgccagcccccctggatgacggagcaggtaccacatgcccctcaggcacccaaggtaaagcagaaggctgttccaggcctctgccatgctttccctcagccctatgtgcccaggcagttgccctcatccccgaagcatctggtccatagaggttggagggagctgacgttcagttgggcacctgctccaggatgtgcatcggggcaggcgtcgctggagggagagtgagcctcagcgagggaaatgcccggaagaggccacacagcaagtggcagagccagaattggaaccccagtgagtcagattagagtgttagtcgacagccatagagtcacagaccccagccttttactagggctaaaattgagggtcccggccaggcgtgctggctcacgcctgtaaccccagcactttgggaagctgaggcgggaggatcacttgaggtcgagagttcgagaccagcctggccaacacggtgaaaccccgtgtctactaaaaatacaaaaattaaccggatgtggtggtgagcacctgtaatcccagctacacaggaggctgaggcaggagaatctcttgaacccgggagacagaggttgcagtgatctgagattgtgccattgcactccagcctgggtgacagagtaagactccgtctcaaaaataaaaattaaaaaaaattgagggtcccttgccagtaccatgccaggcacaaagccatcggcactggagggcatcatttattggtgatcatttactaagcaggtgcttgatatattaacctcatttaatcaccatttgggggtgcctgtggccgttttacaggtggggaagcttcgaggagtcaaagcctgcttgttgtcccctgtcccttgggccaggctggggcctcaggagccccacagaacaggaccactcccttgtcctcatcccagccctttattttccatcaagagctccctgagcctcttccttcccaggctgaacatcttttattccttcagctactctctgtgggatgtagtttctggatctttgtctacctagtgagctgctctggtgatgccagggagtagagtctggaatcatcctgaactgggatccaggctgtgtgacattggctgaatcacatcccctctctgggcctcagtctactctgctgtcaaatggggacataatgttgatagtactcatcccttacaattgttaggaggactgaatggtctgaaatgtgaaaacggattttgtgctgggcctggtggccaggaacaggtcagtcaacatgagccagtactgttaaggtcatgcacccgtgtgaggtctgatcacaacatcacacggcaggacgatcacctctcttgttctggacaatctgctcctttggctataaccttaaatttcacttggcttacacgaatacagtggaaagattaagaactctggagtgcaatgaaagtggattcaggccgggcgcggtggttcttgccgtaatcccagtgctttgggaggccgaggagggagatcacttgaggacaggaatttcagaccagcctgggcaacgtagtgagacccgacttctaccaaaaaaaaaaaaaaaaaaaaaagagaagtttaaaaattagccaggaatgctggcatgtgactgtgctcccagctacttgagaggctgaggcaagagatctcttgagcccggaaggttgaagctacagtgagccatgatcacgccactgcactccagcttgggcaacagagcaagagagcaagatctttctcttaaaaaaaaaaaagtcaattcccagggactttggacaagccacttaacctcctgagccctggtttcttcatctgtacaatggtgatacaaaatccttcacggagttctggagagcagatgcggtgatgtttgaaagcattgcagaggctccataaaagctgcttcctttcctttaggctttagtcattattacccttttggctcttattgagcttgtggtcatttgagacctccagctctttttctggttgagaggcaaactgctcaccgtcactcagcaaagtttggtgaggaggcttgagtggatccctgggtgcgaaagagtatcccaaccacagcagagtcccttcctgaggtcttagccgatccctggcttcccaactttaggagcccacaccactccactccttggacttcttgtttcagaggggtcggatgaggagtgccgatgaggctgggccctctgagaactggctttgaggccttcccagcaaccctcctccgaggtgcttctgaaccaagtgggttggcttaggaactgcccatctcccagaactttcttggggtggccctgcatgcccaccctctccccatcataagccagactggaggtgggtttctagcggcccagttttgtcctggagtatggagtgctggtgagaaagagggagagagaatggtgggtggggaaggaggagacaggagtgaatggagagatatgcaagtagagagacagagacagatcagagggtggggcaggggcagcagctgatgtatcccccagtccctagggtcaggatcctcttgggggctccccctgtgccccatcctccatccaaccgcagggcagggggaggaaggacgttcagggcagtcccttccagccgacatgcccatttcctttccctgcacctcaggggaagcagatgccaaggcaaatgggcagctcctggctggctgtttccatggctcacccctctctccttcccccgtggactttgcataagtctgtcatggctgttggtca

SEQ ID NO: 95243 - DNA, 31703 bp, Homo sapiens
ttatttccatgtgttgatacatctaacccacataaacagaagttcttggggtcttcaatattttttaaaagtataaaggggtcctaggaccaaaatgtctagaagtttggaaagaaagagatggtaagaagcaaagaaatgtttattaatggtaatgataagaacagctaatctgaattgaatataggcactcttctaagcactcataaagtgttaattcattgaccttcatataaactctatgaaggatcagcaatacttagaagaggttgctatttttagtgccattttttttttttttttagacagagtcttgctctgtcgcccaggctagagtgcaatggtgcaatctcggctcactgcaacctctgcctccccggttcaagcaattctcctgcctcagcctcctgagtcgctgggattacaggtgcccaccaccatgtccggctaatttttgtatttttagtagagacggggttttgtcatcttggccacgctggtcttgaactcctgaccttgtgatccacccgcctcagcctcccaaagtgctgggattacaggtgtgagccacctcgcctggcttcttagtgccattttagagatgaggagaataaaccacagaaaaacttaagtaggtcatccaaaggcatacagtttttaaatggagaaggatttgaatttgggaagtctgaatgcagaacctatgttctttgtcacaattgtattagaatgaaagacagttttgtatatctgaagtggaagaaaggaaaaactaagttgtgagaaataattttgtaacagttttatactatgattaattttcaaaagaagataaaaactgagcatagagagaatacagttaacatataagaaataatagaacttccaatatttaaaatattaaccatctattaaatgttcaactgaataaagcctataagataaagagttctttgagttacttactctgaaaaataatccataaactgctgaggattttctgaagccagcaatagttgtctctgatgagattcggacatacaatgacacttaaagccattctacaaaaaatgtaaaagcaataaattctgatttaggtcatcaaaatgggctctaaatagaagtatttagttaaaacccaaaaaatctgctctttgatgataaattaaaatataatcaaatcattagctgtaactactctatcaggttttcaaaaaaaatttttatagagttgagctttcaactctgctaatcaaagaataatccttgagatcaaagagacagcaaaagagtgttgtagaaaacagacattaataagaaacataccaggcacagaaacagaagagagattccattttttagacttaagttaatcaattctcattgagcacatactttatacaaagtgtcagacaagtgctcaaaggagtaaaatgggtcattagtgaatttccaccacagaaactactttcgctcactttcctctacttcagctcattatccaaaatacattgctgcatattatattaaccttgttaaacatattaaatctgtaccttcttaaaatgacaggaaaaaaacatacaagttttgacttagtatacctctccttaatatttgaccctcattcttcactagtaatagaaacaaaaaatgtgcctttcttgtattccctatctctatctgaagcacaagcacccaagccatgaaaccagacaacatcctagattccttcttctctttctacctccaatttaataggaagtctattcagcttcttaataacccatattcagtccctctgatcaatctcactgacaccgtccagatttccacactcgattttgcttcaaatagtttcctaatctttagatcatggacctcttacacaatttttgcctcatctgtgccctataagaatcatagttattatttaaatttatttttaaaagaaacttggtatcagcctcataaataaacagtatcactttccatatattaaaaaataaaataaaatgaacaaacaatacagttactaaatcctagaaacccaggagtagattggggggataccctggctctgaccttcattctcttcagccttccagtatcaggagattacagaaaagaattaatcctttactcctttcccaaaaaaattgcatctcagtataacatttaaggatggccagacacagtggctcatgcctgtaatcccagcactttgggaggccaaggcaggaggattgtgtgagcctccgagttcaagaccaacctgagcaacacaatgagacctccatctccacaagatattttttgaaaattagccaggcatgggtggtatgtgcctatagtcccagctacttgagaggctgaggcgggaggattgcttaagcccaggagttggaggatgctgtgagctatgatcgagccactgtactccagtctgggcaagagtaagaccctgtctcaaaaacaaaaaaaaataagtttaaggataaccaaatagccctagttgatgagcaaaagctcatttgtacaaaagcatggcagccaatcataaatgttaaaaaaaaattagaaaaataacctctttgcaactcctaataaaataactgactcaggcaaggatgctaaaacacacaggtaaaaggttaatgggaaactagatatataggtatgatttctaagtattaccccaatactcacttgctcttacaagggggaaaataatactttctaatattatttacaagctgtcacctttactcaatttaagtactaccaaacattattggcttccttatatgatgctatatgagatatacaagatcacctataaagaatactataggctgggcatggtggcttgagcctgtaatcctagcactttgggaggccgaggcaggaggagtgcttgagttcaggagtttgagaccagcctgggcaacatggtgagaccctatctctatacaaataaaaaagttaattaggcatggtggcaatcacctgtggtcccagctacttgggaggctgaggcaggaggaggattgcttgagctgggaaggtcaaggttgcagtgagccatgatcgcgccactgtacacgagcctgggctaccaattgagaccttgtctcaaaaaaaaaaaaaaaaatcatattcctccctgcaaatgtttaacctgaaattaatctatcaagatcacctacaaagtattctttctccccaaaatgtttaatctaacccaatcaaagcttttagatataatttccagttgacagaaactacgagttagaaggcaaaagacaaccagaggaaacaagtcaacatatatgggatgctacaggacaacagcctggcctcctctcttcaacaagtcaatgtcaagaaaaagaaggctgggcgcagtggttcacacctgtaatcccagcaccttgggaggccgaggcaggtgaattacctgaggtcgggagtttgagaccagcctggccaacgtggcaaaacttcgcctctaccaaaaatacaaacattagccaggtgtggtgccaggcacctgtaatcccagcctgtaaagtagctgggacagctacttgggaggctgaggcatgagaatcacttgaacccgggaggcaaaggttgcagtgagctgagatcgcatcactgcactccagcctgtgagayaggtgagactctgtctagaaaaaaaaaaaaaagaaaaaggggtggagggaaaatgggttatattctaaattcagaatatagagaaaattaaatttagagaaaactaaaagtcctaataactcagagcacagaggactttttgggcagttaaactattttgtgagattttataatggtgaatacgtatcattatgcatttgtcaaaacccataggatgtacaacaccaagagtgaaccctaatgtaaactatggattctggatgatactgatgtgtcaatgtagtttcatccatggtaacaaatataacacctcgttgcaggatgttgatgatgagggagactggagaggggagcggaggtcctaataaccaaacctataacagtctattgcttttgatcgaatcttgatttcaaggagcagttggaggacaactgaggaagtgtgaatgtgtattagatgataaagaggaacttctattaattgtgttatgttgatgacatatactatggttatatagaaaagtatcctgaaattttagagatgcctatttaagtatttaaaggtgaaatatcctgatattggtatttaccttaaaatattttttaaaaagtaaatacggcaaaattacttaaagtgttaagtctgggtgttacagactgcatgtctgcgtcccctcaaagttcatatattgaaccctaacccccaagggaatggaattaaaaggtgggcctttggagatgactggatttagatgaggtcacaagggtagagcctgcatgatgaacagggtgggaccgtatctcaaaaaaaaaaagaggaagagaagtttctattagagcttgctctatctgctttgtgaggatagaggcagtttcgcaaaccaagaagaggaccctcactagaatctgaccatgccagcaccttgatcttgaacttcccagcctccagaactgtgagaaataaatttctgtcatttaaaccacccagtctactgcactttatatggcagtccaagcagactaagacattagataatgcatatacaggtattccttaatagaactaaagagagtaactgtatcaatattagtatgagtcctacctaaaatacctcttccttcacttgcagaaacactggattagattattccaattgcctcagtgttcttccacccttacccaatccagtccaatctccggagaaaaatatgatcacatcactagcctgcacagcattcaatcaaccacctctttaatggggaaaagtgtaaattccatagtgtagccatataaggcttttcgagatctgcccagactccttgagccactctatatatacttcactcatttaaaactcagcgacaatcctacaagtaggtgaaattattattccctctttacagataagtaaaggggaatataagtaaataacttgcccaagaccacacggttggtaagtggccctgcttgactttaaattttgacagtctgatatatccataaaccagataaatccataattttaaccacaatattattctgtgcccggtacagtgtaggtgctcaataaatgcttgctagatgagtagtgtggaagagcttagctctcctttttcacctgatcccaaaagaggagtgaatcctaaccaccctgtttctcttaagagtcaagtcaagtcagagctgatgactgttactggcattgcccgggcgtctagtattgcagtatccccgcccctgtgaggggtgcaaaaccttttctgatttcatttctttggtggtggggatcggactggggaggaatgaggggtcgcagaacacaggctgcccgctgggcccgggggctgcggggagggacggctctcgtgcgctgagtagttgactcgcccactgcagacctcagaagcctcacgacccggaccccgggagccccagccccgcgccctcagccccgcgtccaggacctgatcctggattgccaggggccctcctgggaagayggggccactccgggcccactcacctcgtcccggcactgcttctggcacatctggcaataccagcgtagcttctgcagccccttggacttgatcctgttggcgatagccttgggagtaagaaaatccgacttccccatggcgaccacggcagcgatcactttctggaccccagtactcagccagccggaaacggaaccgggctggcggcggtgggcgggacaaatcccagctgagaggcggaaggaggtggggcctgggaagactgggttgcaacggtcgcgagactcccctcgccgtagcgcgawgaaacgagactgaagaagagagcaaggtgggaggggcgcgctggggagcttcggcgcatgcgcgctgaggcctgcctgaccgaccttcagcagggctgtggctaccatgttctctcgcgcgggtgtcgctgggctgtcggcctggaccttgcagscgcaatggtatggcarcttgcgggaagatcggcaggaccgcaagggatggaagagcttgggcacggggcagggaggaggagatgggcgcgggggcagatstggggtcgcagggcctagctgggcccctggcccgtcggaggcgccgggtagcgggggctgcaggaagcggctctgaggtcgggcaaggtgtgcgcagggccgggctccggcggagcaaggtcccgcccggttccctgaggtcggagggccacctgggacctcgggactgcggcctgagtccaaattgacgtctgggcggtcttgagttccctcagctaatcagcacttcctgagcttccacttccactgcaagccaggcccccagtctcagggcctgcaaggtgacgggagcctgagcaatagcccaggggaaggttaagtcgtgctttttgtccttgacgccctttgaaaccctstagtgctggacagagtgaccctttaagattcgatcgagtcagagagcgcggccgtcgagcacctcccgtgttgcagacgctttgctgggtgctgcaacagcaaaggcgaacatcctagatgcctctgagggtggttttggtgcagaagggaccgtacagatctgtctgagggcggggaagggaaggacacctagcactaccttgaaaccacttgctgaaaccgtaaccctgcaaggtcatgaaattgcccccaggtcctgggggaggagttcggtgggcttttaagtggcatttgttaactgacatgcaactaaagggtgccacgagcctcgagaattttaaacattagttccgggtagggggacctgggctgggggaagtgcatattagaaggcccgggaatgggcaggtaaaagttggtttgtgggtggtgctgttcagttttgaagcttgacggaatctggaagaattccagacacgctgctaaggggattctaggctgtgtcgtagcaattccctgctcttaacagtgtggaggatttctaaggcgctacagtgctaaactagattttcgtatcctaatttatatgaagggaccataaagcattagttgaaataaataggtttttcattaagcaaataactgatagtaatatacgagattttcagaatgatatctgatgtgaattagccacataaaatttttggtggcttggccttggaagtcagatttttttttctctaatatggaaaaagaacattcatgggaattaaaaggtcactgtagttgaattctcagttgtatagattgtcccacttgttaaccactcagcagacattagctgagtgcttccactccacccggtggtacttggaaagtgcccaaatgtgatggtgagcaaatagataaggtctcagtcagtttcctgggacagtgcctggcatgcagtggtgctctgcgaacatcagctctcctggccttaccttcttgccacgcattaatgttatctgtcagtatttttacaaccttagtttctaagttgatctttaaaaaagtggaaatagtttctgaaacaaagacaatattttacaaaaaattttagaaatatctttttttaaagcacctgtaagatawtttgaagctcttttagtgaaggattgttttaaataagagctctcagttcaagacaactactgttaggagcttaaatcggaaccacaatcagcatataaaggtcctaatcctgaccttaatccctttggaatattggttttataaatcatcaatcaacagtgttccactatgaaagcatattctgtcttcttcttttcatgtattccttcactgctggtgcttaatgtctttccttcctcttctgccatttctctttccatgaattataattgccttttgaattcagaaattaaaaccactccacagaattaatttggaaggggaagaaaagacctttgtcttaacgaaccatgaagaggcatatttccatgcttctgtcttgattactggaagttttttaaagtacaatttgttattttagtttttgttttcagagaggctaccatgctaacataaaaacattaggcttacttaaattcacagtggttattttaatagttgttagggtatcggcaaaatactctaacgttttgaaaattaaaccttttttttaaagcagcatataagaaaatggaaattaaaaatttgagagaaagaatcccggattttactgtcttcaaatttgggaaaaacatttctatttcttagagttcagtagtctctaaaatggaactgttttttaataacgtgtcagtagtcataaactacagataccgataaggagatggcatttcaggagagaaaagacraattgtcatctgagaccatgagggcagatatttactaataaatgtaaaaaatgtgaggcagcagagtgtagtactgtatgaagagagagactctgtagccagccctgaagggctgcattcagacggcagggattgaattctgattgccacttagcagctctgtgaccttgggcaggttactcagtgtctgtcccaccagttcctcatctgtcaaatatatgcaataaaagtgcacaattcagtgggttagtgtgaggattagagtatttgcaaagcatgtaggacaatgggrgaaatgctgatagggatccaaatgctgtatatcagtagagaaatgaagagtttttaagtacagtttctayatcaaatgtaatgtaagaagattgcttggacttgcgaaaagaggaaaagaagatgcagtcgggctaggcgcagtggctcacgtctgtaatcccagcatttwgagaggccgaggcgggcggatcacaaggtcaggagatcaagaccatactggccaacatggtgaaaccctgtctgtactaaaaatacaaaaattacccagacgtggtggtacgcacctgtagtcccagctactcgggaggctgaggcaggagaattgcttgaacccgggaggcggaggttgcagtgagctgagatcgtgccactgcatttcagcctggcgacacagtgagactccatctcaaaaacaaamaaaaaaagatgatgcagtcatgggtgtgggttaggtaagtgtgaaggagtcagtttttgctggtggcaggtaatggacttttacacgcttaatatcagaattagagtcacttcataattttcgttgagaattagccaatattgcttgctttttaagtttttatgtatcttaatatactccttaaaaatctctcaaacaatagtttcttggaagggtgtcattcctgactccctcctccactgccttcgtcagctgttataacagcgctgtggaatcatggtagatagtggtaatccacggtccatttgattctccctccactgtgtttcttagtctcccgaggatctcaggacgtgcaatgattcagagctttatctcctcatttgcaaaacttttatatttaataaaggaagctatccctaaagagagttcaattagctcatcactgttcttactcaaattgtacctaacaattaaagtagtaacatagacgtcttcagaattaaatgaaagctaaacatgagagtgctttaaaacacatgaaattagggcaaatgcgtagcattatcacaaaagatgctacctcttcatacctctgacttggagtacttaaggaaaccaaaacattctgtgtttgtccaaatatggtattcaattcaaatttataccatatggtattctctgactagaaacttgtgtcagttgaagtgtctgcctaaaacaataatatccaagagtgacttgttataaccaataaattttgtgttsagggagaaaagtcattactacaccaaaaaaggaaggttgaccaaaaactggtattacttttcaagtgtgattatgaaaagctgttgtagtagaacagtcatggcaggtagtttgtgctctgaaataacagagcttgtcaggatttgccagcttttatcttttcctttagtagattcattcttaaaaccaaacctaatatttttcgtgctgtagtgggagaatcacctgagcccaggaagttgagactgcaggaagccatgatcacaccactgcactatagcctgggtgaggggagtgagaccctgtcttcaaaccgcaaaaaacaaagatccactctttttgttatacagttccacggatttggacaaatgcataatgacatgtatccaccattacaatatcatgccaaagagcttcactgccctaaaaatccctcctctactctccccaaaaccctgacaaccacttctctcaactattgctagatcctcggcttttctggcatgtcacatagccagaatcatacagtatttgctttttttcagatggccttctctcccttagcagtatgcacttaaggtttctccatgcctttttataacttaatagctcctttgtggttttggtgaataatagtccattgtatggatgtatcagagttagattatccattcatgtattgaaggacatctgggttgcttccaacttttggcatcatgaatgaagctgctttacatgctcttgtgtaggttttatgtggacataacatttcatctcagttgggtaagttaagactaggtttaggtttgtaaaaagctaccagaacatcttcccaagtggctgtgtactattttacattctgccagccatcaatgagagttccttttgctccacatcctcatcatcatttgctggtcagtttcttgggttttatccattcttgcaggtgtgtagtgatatcttactgttttaacttgcagttctctaatgacatgatactgagcatcatcttatgtgctttttgccatctggttggtttttgtttttgttttttgagacagagtcttgctctgtcatccaggtggaatgcaatggcacgatctctgctcaccacaacctccacctcctgggttcaagcgattcttctgcctcagcctcctgagtagctgggattacaggtgcccaccagcacgcctggctaattttttgtatttttagtagagacggggtttcaccatgttggtcaggctggtctcggaactcctgacctcgtgatccgcctgcctcggcctcccaaagtgctgggattataggcgtgagccaccgcacctggccctgccatctgttgatcttctttggtgaagtttccagatcttttgcccattttttttatttgggttgtttgttctcttattgcattttaagagttgtttgttttggatacaagtcctttatcagagatgagttttagaaatattttctcccagcctgtggattgacttttcattctcttcacagtatttttcacaggacagaagttctaaatttcaataaagcccaactcatttttttctgtcatggatcatgcttttggtgttgtgtttaaaaactcattgccaaacccaaggcacctggattgtctcctgtggtatcttgtagaagttttatggtttggcattttatatttaggcctgtgattcattttaagttaatttttattaaatttgtaaagtcattgtacagattaatatttttgcatattagtgtccagttgttccagtgccatttgtttgttgaaaagaatatccttttttccttgaattgcttttgcttttttattactgtaactttagaggaggtcttaacgtcaggtagtgtcagtcctgacaatattgtttgacttttctaggtctttggccttcctatataaccttgaaaatcagtttattgatatccacaaaatagatatcaactaaaatcaaacttgctgagattctaatggatttttaaaattgtaaaacacatggaacatgaagtttatcattttaaccatacaattgtgtgygggcatttttaacttcatactccagtagttcagggctgctgcagaggaatgcaactagctttttatatacactaaccttatatcctgcaaccttgtcataaatgcttattggttctaggaggggctatttttattctttgggattttctacatagataatcatgtcatctatgaacaaaaacagttttattccttcccttcaaatttctatgcctcttattttcttgtcttactgcattagctaagacttccagtatgatactgaagaagagtgatgagtggggatttccttrtcttgttcgcaatcttatggggaaagctcctagcctctcccattaaatcagagattttgtgtgttgktttttttttttttagcaggttgaggaagttctctattcctagtttgctgagagactttwtcatgactgggtgttagattttgttggatgctttttctgcacctattgattgtatgattttttctttaacctgttgacgtaatagattatattatttgattttttaatattgaaccagctttgcatacctggagtaaatcccacgtagtgatggtgtataattatttttaatacattgttggatttgatttgctaatacactgttgaggatttttgcctctaacctatgctcatgagagatattagtcactgtccaccaaggtcattcaattagagaaaccttagatcattcttactgctttcctttctactacgaatgtacatgtgaagaagttaaatgcttgcaaatctagtctcctattgctttgccagcatcttcatccaggttcttgaggtctctcctgaggctgtggcagcctacatccccatgtcttctgtgttcatcaaaactccaacctcattttacgcttgtcactgccatgtgagatactttgctgaaatactaaactgatttgtgggcttataaacattcatttccctattaacctacaaataagatttaaaccaatttgctttttttgatatttaaaaatattaattatttaaagtaacaaacccaactcatgtgtccagtttccccttctccatttctcactctttcctgawcatgaatgctcttaaaatgacattctgttcccgagaatcccctcctcacatctctactttgtgcacacatttcatcatgctcagttctcctgtgtagctttgcctgcaaacacaggcactttgtatggatttgaaggcagaaagatcatctaatattttttagcatgtcttcccccattaggccaggaattctctcatattcatcwttcaccaacatttcatttaagcctaatcattttgacttctgcacattagcatttcaattttaaagacttgaaaaaaaatactaaatgttatgtaaatgtaattttttatgaaccttgtttacaaggtaacaatatgtcagagaccatgtcgtgtttaccagtgcctggaatttagagcatcttggtaaatgtttattgagctaaattgaaaaagttaagaatcagtttatataaactacttttacacgtgtagtcatgttcgactatatcattgactctgttactggaagaggttgctgtgaactaaggaaatttttagagtggctggccttgattcgaagtatagttgggcagcttaacaaggggaggggcttttctgtcatggaaacaagataagcaaagatatggaggtgggactagagcatgtgtgagtcaatagagcatgttgacttctgggaaggtggtggtacagacaggccaaataaaaggaggccttcaatacagggattygcgccactactaagggatttaaatatatgtctattcatatacattctgagtcctgtatttgatagattgtttctttrtggggtattctttaaataaatatatattaactgaaagtttttcttgtataatggaactatttttcaaaaaactgaaacatttttaaaacttttatcctcaggattcaagttcgaaatatggcaactttgaaagatagtaagtatgttgtttgtctcaatatgtgaattgagaaaaactaaattttgacaaatacaaatactttcaaaaatatactgctttagcccrttgtgtatttgatsaaaactgaccaaatggatttccattgtatgtttgggacattggacttgttctgaaaagaccagtaagaaaggacacctgagacagctatgttctgttgtttgtagaatgatcatgatataactagaaaaaattataccagtgttggtgtaggtgggtgtatgtgtgggaaggggtaaatcatgttatatataaataatgttatggaatatgtggttaaggcaactttcaataccatttaatgttttaaatgtatattattgtcttatgttgccatttgcttgtcctaagtagtagctagttttgccttccttttattagtactatttctwtttttttttttttggagatggagcctcattctatcacccaggctggagtgcagtggcgccatctcggctcactgcaagctccgcctcccgggttcacgccgttctcctgcctcagcctcccgagtagctgggactacaggcgcccgccaccacgctcggctaattttttgtatttttagtggagacggggtttcaccgtgttagccaagatggtcttgatctcctgacctcrtgatccgcccacctcagcctcccaaagtgctgggattacaggcgtgagccaccgygcccggctattagtactagttytaatattaagactggtttagcatcgtgctgtttattgtttatctaagcgctcattattctgccttgcacttyagaaaaatatgtcaataaattcacaaggaagttatactgtaattcctttgtcttaacacagtacttctatttttcagtcaccaggagactaaagtccatcaaaaacatccagaaaattaccaagtctatgaaaatggtagcggcagcaaaatatgcccgagctgagagagagctgaaaccagctcgaatatatggattgggatctttaggtargggaagagtgtaattcacaaattaggaagaactgtttcacacaaggaagactactgatgacttacatttagagcttacastgatgtcaagcctatctgagcacttgccatgtacttatttttcatctacatccacttgacacgtaatgataacaacccgtgtaggtagtacaggtagggactgttagaatccctgctttccagtgagaaaaactgaagcacacagaagttaagtaacttgcctaagatcacatataaaaggatgaagagcctctgtttggacctatgtggtttggtgtcgagtctgtgtatttgttagccattatacgtgaccatgttaacttttaaaatattctgaaatgttcccagttgttaagtataccatcagaagaacttggaaaccgtgcgttagatgtaagggcttaatttcatcctatgaccttgtagtgtggcattttaggactgcagcgggggcgggtgaggggcagtgcagtggagagctggccttgtggtcatggatatgactcatgatggtgttttgagaatccgaacgatgttgaagcaggaaaagcagctgagaacctccattttcaagatasttaatcaccattcttatcttttcaaaagcatgaagacatttttccttcagaaatttatgtaatccatccttaattagtcttcttaatggaaaagagatgagatatgacagtttaaaaagaatttatattgtgtttttagatgcttttatacttgtttgattatgaattyatcttggaaataaagttgtaaagagctggaaatgggaaagaagtttctattttaacttgtaattacattctttctcttaacttttttatgatcatgctgtcttatcctgagttgaggctatctaaaagaatttttaacttaaggaagatttatgcatatttgatagtaaagaagatcatgcagtgaaccccctatttatctaccaaatcctcagtatctcaactgacagctgtcctttgtttttttatgtgtgtgtgtgtkttttgttgttgttttttgtttgttttctttttgtgtttttttttgagatggagtctcattctgttgcccaggctagagtgcaatggtgcaatctcagctcactacaacctccccctcccaggctcaagcgattctcctgcctcagcctccccagtagctgggattaacaggcccccaccatcacacctggctaatttttgtattttttttttctgagtcggagtctagctctgtctcccgggatggagtgcagtggcataatctcagcttgctgcaagctctgcctcccgggttcacgccattctcctgcctcagcctcccaagtagctggggctacaggcgcccgccaccacgcctggctaatttttttgtattttttagtagagacggggtttcaccgtggtcttgatatcgtgacctygtgatccgcccgccttggcctcccaaagtgctgggattacagacgtgagccaccgtgcccagccaatttttatatttttaatagagacgggatttcactacgttggccaggccggtctcaaactcctgacctcaggtgatccgcccacctcggcctcccaaagtgctgggattacaggcgtgagccactgtgcccggcctcagcttacagctgtcctaagaacacctgcttacactaggcagttgccagctaaatttaaatgcgtattttggaaataaccaactgctttgtaaattagagatttattgtatttagtgtattgcatataaaaaaattactgcttttgtttgtttttaagctctgtatgaaaaagctgatatcaaggggcctgaagacaagaagaaacacctccttattggtgtgtcctcagatcgaggactgtgtggtgctattcattcctccattgctaaacagatgaaaagcgaggttgctacactaacagcagctgggaaagaagttatgcttgttggaattggtgacaaaatcagaggcatactttataggtaatttaaatatatattgtttattttcataaagatgtaagcaygaataaatcttctctcaaaagttytgacaaactctcaaaaccttcatcaataacaaggtatattcttcagggccttttttggtatattcacaagggggtgtttgtttcctttttcttttttccaggatatattggaacatttctgttttccttcccctgttttctacctttgcttcttcatccggatcataagttgaatgccatgtgaatatcaaaagctatcagcattaagccaaatgaggcatctgaggagctgttacagcctggaaatgttagcaatagttcattaggattagaaggagaggaataaaggggaaaagaatataaaacagacctcatttttagttcttagttctttgcaggtgctgaaggaaaggaatkatgatagtgtgtggaacaactcaggaaatcaccaccacccataccccaaaagacctgatccatggtgacaatgttttctcctgcctgtcccctgtgctctttcagcagaaatcttattaaactagctatgtgagctcttgcttttcttataggactcattctgaccagtttctggtggcattcaaagaagtgggaagaaagccccccacttttggagatgcgtcagtcattgcccttgaattactaaattctggatatgaatttgatgaaggctccatcatctttaataaattcaggcaagacagatttagaaatcaaagcttttttatgttcatgcttttgttcatattttgaaataacagtttaaaaattattttgagatttacatttgtttttgtcaattctaggtctgtcatctcctataagacagaagaaaagcccatcttttcccttaataccgttgcaagtgctggtaagtagtttttctatgatacatattttttggcatatagaatggagagatttgtacactaaggcagacagtgtcaagatatctggtggtagctatagcaaatgatttggggctgtttcttttttagatggaatcttgctgcctcccaggctggagtgcagtggcaccatctcggctcactgcaagttccgcctcctgggttcacaccattctcctgcctcagcctccctagtacctgggactacaggcacccgccaccaagcctggctaattttttgtatttttagtagagacggggtttcaccatgttagccaggatggtctcaatctcctgwcctcgtgatccacccgcctcggcctcccaaagtgctgggattacaggcatgagcccagccttttatttttttattttttwttttttgagacggagtctcactgtgtcacccaggctgaagtgcaatggcatgatctcggctcactgcaaccttcgcctcccgggttcaygccgttctcctgcctcagcctcccaagtagctgggattacaggtgcacgccaccacgcctggctaatttttgtatttttagtagagacagcrtttcaccgtgttcgccaggctggtcttgaactcctgccctcaagtgatccacctgccttggccttccaaagtgstgggattacaggcatgagccactgcacccggccgatctggggctgtttctgagaagtgccatctcttgacttccatgatacttaattcagtcattgtttgataactcctgctctattctgtcattaattgaaaagtcagtatctattgaggttcatcattagatttttttgtcctyaaggattgaagagcgtagctagaaactggctttgcaakttatgtttgggacctctaactacaataaaacagaagctctagaatagagagttgaacagtgttcacagctaatttacaytgactgactcaattctcttgttttawtgttggaataaagtcatcattgatcattgaagcatcctggaataatattctggaactgattttagttttctaaggcttttttcccttgtatataccatctattyyctaatacttcatttattttcaagtatgtactttacacgttaatgtttctgaaattgagatggctctaccagccaatggaacatcatttataattgagtacatttttttctctcttaatgagaaataaagtaggtgttacaaccagtaccatttaatgaaatatagtattttgataatatatagtactgtgtcaccacttgaccccaatgaatgaattttgaaatgtacttctaaatttctacaacattaaaactacgattcataccaatttctagttctcccactctttcatgtgctttgaaaggttttccctctctcattttccagattgatacattcagatttcttcagtaatcaaatgactaagttggaattactgcacaggttgagtatsccttgtgtgaatgcttaggaccagaaatgtttgggatttcagaatattttcatatttataatgcagtatcttggggacaggacctgagtctgtacaccctatacacatagcctgaaggcaattttatgcaatattttaaagaattttctgcatgaaacaaagtttcaaatgcaccccatcacacaaggtcaggtgtggaattttccacttgtggcatcacgtcagtgctcaaaatgtttcagattttggagcacttcagattttggactttgggattagggatgctcaacctgtattacactaaattcgtttcaattcattattattcttttttactggaaaaagcattgagtgcttgctggctttgtaacaggcacatgctaatgctgtccagagggcttcataaccacgagatatagtgcagttatttcaaatgttgacctaatttttctaaagttacacatgtggagtagaatatcaaatggtttatttacacattatattttgctaaaaatatgctatcatctgtagtgtggaaatagatgacattattagaacagattcatttaccttatctagcattaatttctgctctgtaattataaaggagttttacactgaaaagctgtttttgatgaattactattccttcyatataacttgaaagaaactcatcacttgttttaacagacagcatgagtatctatgacgatattgatgctgacgtgctgcaaaattaccaagaatacaatctggccaacatcatctactactctctgaaggagtccaccactagtgagcagagtgccaggatgacagccatggacaatgccagcaagaatgcttgtaagtacacagtatggacagtgccagcaggagtgcttgtgagcacacagtgaatctcagctgagaggagtccgtggccgagagtagcatcaacaacattaacatgatattcctgtacctgtaagaaagtatatcttgataggtagttgatttgcaagtactgtgaaaaggtatcctatggaagatgtaaaaatatcttcataacattatttgagaggccaattttggtatccaaaaatttcttacttttaaattaagcaacagaagttagttaacaagttattctactctagtttcagattttttatgtagtgtttttgttttgtttgtagctgagatgattgacaaattgacattgacattcaaccgtacccgccaagctgtcatcacaaaagagttgattgaaattatctctggtgctgcagctctgtgagtaattgtagattgtcgccttcagagaattttttttcctcttgctgtgtctgcttgtttggatgcttaaaagtttttcgtttttktcttttgaagttgaaactcattgctgaaacttgcatcctaactcttaggctataaagatgtggtaaaaatgggacctctttgctttatttttattgtttcagctggaaacactcgggcttagttttcggttttctaaaggattaggaatgggatgtggataattcagtatcatttatgaaatctttttttggaatttaaacaattgtaagccaagctttctgagttacagggctagtttcagatttggttttacataaatctataaaccattgcatgttgggaaggtccaggaattttttaatcattatgttttttaatcattatgttttctatatcagtaccaaaagatagtatagccatccctcagtatctgcagtggattggttccagwactcactctcacctcccccaggataccaaaatctgaagatcctcaagtccctgaaataaaatagcacagtactacatataaaaaatgcacatcctctcgtatacttttaatcatctctagttataatgctatgtaaattgttgttgtattggtttttgtttttattattttatcattatttttgtcttttttccaaatattttacatcrgctgttggttgaatccatggatactgagggccaactatatactgctttcctcaagaaaatttcttagttgttgaaaaactttratgtttatgaaaaaaaggttaagataatgggaattttattcaaaaagttattaagttgaatacccactatgtgcacagtacagtgctagacacagtgttaaggatgtgattctctcttttaaggcacttatattctaataggataagaaacatacaagtaattgtgattagataaaacrtgtagtaagttctttttgactcgttccttcttacctcctgctaatcagttaccatgctctttaagttttaccttctaactatctcttgaatcttcccccttctttatgcccacttaatgcagatccttgtcatttctctcctgggttcaaaaaggtaattatttgagtgccccttaagtgtcaggccctgtgctagacactgaggatacagtggtaacagtatttgccttcagagagctcagtcttcacagtaaaggcagacactaaataagaagtcacagcagaacagaggttgctaaactgtggcctggagctaagaatgggttctgcatttttaaagggatataagaaaaaggagagtgatagcgtgtgacccacagagygcagaatacttgctgtgtggcccttcaccgaaaaaatttgcctattcttgtgacagtgttatgaggaaaataacaaaatccattctctgttatacactcattctgcagaaacactcgatgtatgtgatcctatattttctggtcaccagcactcttcccagtccagtctcttaccattaccatttctcacgtccttgaacctcagccaccttgatctacttccagatctacagattcgtcactctttctcgcggccagggagtggcatgtgctgcagcctgaaaagccactatttcttcccttgctcccttgattcttcatctgactgcctcctgtgtatccttccttactcagctgggggaatcctttcttccagaaarcactccttccttcagtctgagtgaggcagccttctgyagcatcctgtcttccatttagcttagctcttacagccttgtatgaggaattggctttttatttgtctgtgtgctcctcgaggctaggatgggaccatatcttattcacttttgtgtccccattgcctggtacatacctccttcgtgaatgttgaatgaatgaatgaaatgccatatgtattcagaactggaagttcagaagagggacaaataacattttattgggtgtatgaaaatgtgggtccatggttttaagagtcagggaaaagttcatcactatttaaagtgttccttaagtgttacttttcaagggcagaaactgggcagaatgccagagagacacaactagaactttttgagccaacagagacctttgtgtaagttgttagttggatccatcagcctygctatcctaagcattcttctcttattttactttctaagcacagctgtgttaggactaacccattcacagcctggtcaccaatgttctatcagcatcacagaatactgtctcatggtgtctagcttgatgaacttggttaggatactctctctgttactcagctttgtcatctgtaacatggggactaatacaaggactaaaaccttctattagccattatccttcttgccatctaccccatgttaaagccaggctgatttgttcttggatcttaagtgtgacaaagcctgcgggaaggaaccacattctgaaggtttgtgggctgtgtgagatccagagaacccaagggggtttttttgctcttgacaaacgaatgttaggtatgacctatgatgatacaacttctgcaaaattgaggaccagcctatttcttcattagaaatgcaggaaacctggccgggcgcagkggctgacgcctgtaatctcagcactttgggaggcagaggtgggcggatcacaaggtcaggagattgagaccatcctggctaactcggtgaaaccccgtctctactaaaaatacaaaaaattagctgggcgtggtggtgggcgcctgtagtcccagctactatggaggctgaggcaggagaatggcatgaacctgggaggcggagcttgcagtgagccgagattgygccactgcactccagcctgggcaaaagagcaagactccktctcaaaaaaaaaaaaaaaaaaaaaaagaaatgcaggamacctatttaaaagtaacagaaacagctgggtgcattggctcatgcttgtaatcccagyattttgggagaccgaagcgagtggattgcttgagcccaggagttcaagacaagcctgagcaacatagcaagaccccatctctacaaraatgaaaaaattagccaggcctggtggcatgtgcctgttgtcctagctactcaggaaattgaggcaggaggattgcttgagcccaggagttttaggctgcrgtgagctatgatcgtgccactgcacaaaaccaagaatttagaaaaaggaatccacataattggaaattgagtattaagtttttgcttcctaggaaggtagtctaaatccttatacaaaaacttagctatgcagtgccaaggttggattgcttgtgaatgggtttgcatgctctgtaacctatcagttattctgaatcaagacttgaatatttaaacatacttggaaaagaaaaagawcaaaaaacaaaataaacatatttggctatttagtaatataattaagaacatgagtaaaccatagtattcgaggtccaagtattagttgccagcctaaaaactaaatatggccaggcgcagtggctcatgcctgtaatcccagcactttgggaggccgaggcgggtggatcacctgaggtcaggagttccagaccagcctggccaacatggcaaaaccccgtctctactaaaaaagtacaaaaattagctgggcrtggtggcgggcacctgtaatcccagctactygggaggctgaggcaggagaatgacttgaacccaggaggaggttgcagtgagctgagatcacgccactgcactccagcctgggcaacagaacragactccatctccaaaaaaaaaaaaaacctctaaatatattgtgttaatttatagaaaaattgtaatttaaattacatattcatagtcttgcctacttgcatgagcatgtttttattgcttctaacctggattgaaatctatgactttttataacaktcattgagtctgtttcaaaggaatcttgtggtaagtatttttgcatgatgtactcaaggtatcaagtttaacaattgactttttttcattggaaagcatatgtgattaactagcatggattgcttcttgacctgcttgttttgtgtttgtctttttcttctaatataataaccagggattaatgaaaatcaagttccatcctcagacaagaggtaaagttcacacattcttcccatgtctgttcagaaaagaaacctattcagatataagttaagctaatttagtaatcctakaattgtcctctgagagatttagatggatgggccacttcacagtagyagccaactcacgggagcacctgggcaacgctagtggacttttttgtagtgagtgtgttgatcatagaaaatgtagatataaggaaataaactttgaggatagagaattaacattattttgagatattatatataggttgtgaagagtggtggttgtcacactttatggtctctggaccccttaatgtctgattcatgtagcagaagccagcyagattttcatctgtctctattcattttgttgtgatgtcatggatcatgtggcctctggaaaactctactgtatactcgagaatgagaatataacaggcaaaataacattatcatgaaaatagttttgacctcatgaaccccatgaaaggttccccagaccaaaattttagaatcactggtatagggtaacactttattgtgtaaattcagttctctgtaccccacttaaatatgtattattatctcttgacattattttcccaaaaaatgctgtttgatttcttacttgttctgtactttgtttttcaggtaaagaaggaaaattcagccagttgattttgtttttagcttactgctgcctttgtccgaagaaacygttcctccattatttgaattactgaagacagcaagatatttgtaaattatcttaaaataaacaacttaaaataaaatcattgtttttcttatatataagaacaatagatatagtttttgaaatgagatgatactaaaacatttaaaaatattaatatgctactattaaaattttttagtagaagacaatttaagaggctcttttgatttggtagtgctccactgaccttaaaatgtctagcctctatggggacaacgtagagggaaagggctgcagccacagcctcagcccagttctgtgccttattacagccttaaagaacagtcaacaagaccaggcacggtggctcatgcctgcagtcctaacactttgggagactgagactcaaggtggatcactggaggtcaggaatttgagactagcctggccaacatggtgaaaccctgtttctactaaaaacaaaacaaaatacaaaaatggtgcacacttgtaatcccagctactcaggaggctgaggcaggagaatcggttaaacctgggaggcagaggttgcagtgagctgagatcgcgccactgtactccagcctgggcaacagagtaagactctgttccaaaaaaaaaaaaaaaaatgccacaggaagcatttgcttggaattctggatacaaaattgcaagcatatacttactctaaattatttaaaacatcttttctaaacactgagaaaagtacgatactcacatttagatcacaattaagattagatgcctgcgttgactccacactctgagttggccatgccaaaatttcaggcttttccctatttgtttaaaattgataacttagttttttgggttttttttaattacaaaagtaatatataaattccaaaatacataaaattataaacaatataaaacccattcttaacaagctcctcttttaaaaacaaatgaatgcatgtatttagaatggattctttaaatatttacagctatattcgtggtaatgaataaaaaggttcagtgaactgaccagagcttcaaagtcattttctaactcccctcaaagttttcaggagccacttctgaaggggttggtggctgagactaggagaaagaaacagctcacaactgaggaatcagatggaggtgtagtgtgaaccagtacaagataccttttgggaatgttagcaacgaaccacrtgcctctggaggctgtgtgtatgtgtgtgtgtgtgtgtgcacgccactatacctggctaatttaaaaaaaaattttttttttagagatggggtcttgctattttgcccagtctggtcttgaactcctgggctcaagtgatcctccttagccctgcaaagtgctggaattacaggtgtgagccaccatgcccatcctgttttgtattttgcttctaagcttggcttgacccacctccagtttctaggagagcagaacacatttgtgagggtgatttgagtgtcctagacatcatggaaggaggaaaagcaggaatttgaaatcagtcaacataagtaagaataatctgtgtctgaactggaatactagctcagcccttaacagctgtgwccttgggcaagttacttaatctttcagttttatgatctataagatggagattaaaagattgttaggattaaatgagctaatattttaaaatatcgagaatctgacagggagtaagtgctatattcttggttaaatgtctgctctatgtaaaattaatcatcagctccctgtagcctttagtggtgctcttctgtgtactggcactctgactctctgaggatacaataacaaaacgcctccttgcaggagcttacagtctggagggaacacaagcaaatgacagaatgtggtaagttacaattggtgagccacaagagggacagtgactcaatttggggacagatgaaggggactgagaaggccgtccagcttggaggaagggaggtctaaacagtcctcaaggaccagtgaccaacagtagaaattaaactactagagctaactggtggggagggaaggcatttcaggccaaggaagcagaaaaagcaaagaccaaaatctgttcaaatgcacattctgaaaactgctaatacagagaacgagaaaggcaagataaatctggaaaggtgagtgtaccatgctgtgtggtttagacatgtaggaaggaatcaaagagtaagcttgaaattttcccccaacttctgtcctctccttttgctaagtggcataacacagtggaattacagtgataaatgaccactggtaaggtttattacataattcaaactgctttttttttttgagatgaggtctggctcttatcgcccaggctggagtgcagtggcaggatcttgacttactgcaaacttcacctcctgggctcaagccatcctcccacctcagcctcccaagtaactgggactacaccatgcctggctgatttttgtatttttagtagagacagggttttgccatgttgcccaggctggtctcgaactcctggcctcagtgatctgcctggctcggcctcctgaagtgctgggattacaggagtgagccactgctcctggctatcctattttctgcaaacacctacacagtacctaaagggctaggtctgttaattttaatattctaggattgagtttccatcattacaactgttgtctataatgtgccctttaggaaactgtttctctgtgtgctttaatatagaatagttgaagctttcagaaactttattatcattattcaaaactctctaaatgaagcttaagaactgtgcagtcactgagctcctggcaccaactgaagaaaaagtgctgccgttggctgaagttgggctcactggtcctcaactgtaaccctcgtcagcattgaccgctacgccccagtactcgcctttcccacattgctcttggttcttttccttgtccaccaagacagaatgataaggatcaggcctcttggatgagtctgagctctgatctcaggaagaaatttcgttctacagatctcatgccccgctaagctgtgtgcagtctcactgctaaagaagcagctgctctccatttctgccactcctgctcttgaacaggttcctgattcctggcctccactgttcacttctagttactctcttcaaagagtggcttcactgagacatcatccacatgccatgaaattcacccttctaaattctaccactcagtggtttttcatatattcagagttgtgctctaatccactctctatatcattgcaagatgaattgtgctaaaaggcattactgaaatatgactaactgctaggtactatttactagtgaatgagacgaacacagatcctgcctctacccccgcaaagtatacagcaaagaatggaatgattttagtttcggacatccctcaaacattaattacatttgagtgatatattggacatccaagcagacattagtcattagatgcagttagctacgctagtatagcactcaggaacaatccaagataaagtgttatattaaggagtcatctttacacagctaatgatgaaatcactgaggtgaatcctatgaaaagagaacactgtaaaagcagacaaaagctgccaggcgtagtggctcatgcctgtaatcccagcagtttgggaggccgaggtgggcaaattgcttgagcccagcggtttgagactagcctcggccacatagcaaaacccatctctacaaaaaagacaaaaatgagccaggcatggtgacatgtgcctgtggtcccagctactcaggagcctgaggtagaaagattgcttgaacctgggaggtcgaggctgcagtgagctgtgaccaggcatgatggtgcatgcctgtaatcccagctttttgggaggctgaggcaggagaatcgcttgaacctgcgaggcagaggttgcagtgagctgagatcgtaccacttcactccagcttgggtgacagagcaagactctgtctcaacaaaacaagcaaacaaacaaaaaaagtaataaaaggcaaagacattgcaggataagtcaaatctttgatattgaagccaggtttctcactttgggagagacaggatatgcaaataggacatgggaggagaaaagggatatgtaattttagacttgaattagaggcatctgtgtgtactttgcacttcaaaagtacacatattgctgggtgcagtgggtcacrcctgtaatcccagcactttaggaggccgaggtgggcggatcacctgaggtcaggagttagagaccagcctggccaacatggtgaaaccccatctgtactaaaaatacaaaaaattagccgggcaaggtcgtgcacctgtaatcccagctactcgggagactgaggcaggagaatcgcttgaacacgggaggcagaggttgcggtgagccgagaccagccattgcactccagcctgggtgacagagcaagactccgtctcaaaaaaaaaaaagatacatattttttagttctttccactacaagggccctgaagcaatgatttccctgtagtaatgaaggtcagctagcacacgtctgggttctaaataatattcctttctaagaagaaccagggctcctcagagagatgtctacttccaagcttagagcaagagaagcacaaggtgagcctggaaaatctagtggcaccaaatagcaagtcctccatgaatgatggtgacacagtacaagaatacagtggccggctggaaagggctcccactggccaaatacgggacaatttaagcagcaagagaatcacgaaggtaatggatcatgacacaccagctaaagaaaagaatccgtgctgggtgcagtggctcatgccttgtaatcccaaaactttgagaggccaaggcaggtgggagttacagaccagcccggccaacatggtgaaaccccatctctactaaaaagacaaaaattagccaggtgtggtggtgcacgcctataatcccagctacttgggaggctgagacaggagaatcgcttgaacccgagaggcggaggttgcagtgagccaagatctcgccattgcactccagcctgggcaacaagagcaaaactccgtctcaaaaaataaataaataaataaataaaatttaaagccataaaaggcatttggggacaatgggaaaatctgaacacgcactttattttgtgggatattattgtgtcaatcttagtttgctgagtgtgatcatggtattatggggaggtgggagctgtgatgcaccatccagatcccccttcagaaggaccttccactgggaatggtggaagcacacagcccccagctgccaaccctcgttggaattgcctcagctggagatcaccttgcccaaggtcatggccccctccggaagcacctacatccagtgtctgatcagtatgagagtataaagaccccctgcctggctcaggacactgcaaagggccattccagccttacagctctctgtgggcttgactgaggcctttgtgagctggagcccaatgtctccctatcccagtcctgctctctcccctttcccgtccccccctttcccatcccccttcctctcccttccacctttcctcctcaacctctccccatcccttcccctccccaagcccctcccttctcaacactgcccttccctagtcctgcttcctgcctgccctcctcttctctctgccaggcggtgaccccaagagccctcctctgaggttaatcttcatctcagagacagcctcctggggagtccagcttgggacatttggtgccggagaggtctgaaagagcagatgcaagatgggattttggagctggattcccccactggctggcggtgaggacttcagtatgggtggtggatggagcacagaggtgctacctgacacaaggcagcagttcctgaatatgcaagtcttaaaacttccaccaggggtgaacagggtagtaaaacagtggaagcaagctgggacaatgtatgaatgtaccagatatttgagaaatatggagctcatgggaccccaaaaatcatagaaac

SEQ ID NO: 95244 - DNA, 47459 bp, Homo sapiens
ggccagcagcatgacagtccccagaaggccttggaccacttgctaagtcccagcagctgagctgacttcagctgtgtgaaacgcagccccatctggagtgggggtggctcatgacttttttgctccgggagttccatagaggctgctcttgaaattggagaagcctgtagcctatgattgtccccatcccactcgaagagaatattttgagaagtctaattatatggtggggtttgcatgggatgagggaagagagtttagataaggcctttctaagggcaggttggcaaggtccagtagggagccctgggtagttctgtgaggcagcagcaccctctgtgggtagaccagaatggctgcaaccaccatgttcccacgagccttaggcgcacgcctgcagcccagcccatctacctaacagaagaggctgacctacttgctgggtgacctgcggtgagttgttgacactctctgaggctcagttgcatcaactgtaaatgaagaatagtaatccctactttgtgccgttgctgaaatgattacagagaggacatgtacccaaagtgttctgcataggacctggtacacagtaccaaatgtgtcctccaaatgtggcagttaccatcattagtcaccccaatatccccatgacccttagtatagatgaccaccgagtgccctagcataagggacaaggcttctctgagaaaaatcatagatgggactggggtgggggctagaaaggatctgtgccgctggctggttgacgttttgatttgccaattccgtctattccaattctgggagtccttgacatcggtcatgggaggctctgacaataaatacgttcataaagaattaaaaacagcccaggcgcagatgcacagtcctgtaatcccagcactttgggaggcaggaggattgcttgagcccaggaattcaagaccagtctgggtaacatagggagactccgtctctacaaaaaaaaaaaaaaaaaaacttttttttttttcagacagagccttgctctgtcgcccaggctggagtgcagtggcacgatctcagctcattgcaacctcagcctcctacgttcaagcaattctcttgcctcagcctcccgagtagctgggattacaggctcccaccaccacacccggctaatttttgtatttttagtagagacgggtttcaccatgttggccaggctggtctcgaactcctgacctcaagtgatccacctgcctcggcctcccaaagtgctgggattacaggcacaagccactgagcccagcctacaaaattctttttaaaagtagctgggcatggtggtgcatgcctgtggtcccagctactagggaggctgaggtgggaggatcacttaagcactggagtgcgaggctgcagtgagccatgatcatgccacagcacttaaacctgggtgacagagcaagactctgtttcaaaaaaaaaaagaattaaaaacaaacttgcagatagcaataagttatatgaagaaaatcaaatagagtcaagtgggtcaagccctcaaattgcccatagtctggggaggcagacatattcatgggtcattgttaaaacaggtgttgcatgcatggatggcatatgcagaggatattttgatagggacaatcaaggagggacttcctaagggaggaaaaagttggagctgaatcttcaatgatgacaagtcaaccacatgaaggaggaggaaaggacactccagatccaagacacggacgtacgcaaaggcttggaggtgtgaaatgaggcggggaatagagcaggctgtattacagggacagaagtaactggaagggcccgcgggggagccggggagccttggagctatggtgggagttgatggttgattggatatggggtggggagaagaatcaagatgacatcgagtttctggcttggatatccggtagatggtggtgctaataagacaagtataaactcctcaggtgagatgtaccgtttgggataggttgggtttaaaggaccattgggacgcccagatggagatgctcaggagacagccagggagacggaaaggacgaagcccactggccaaaggcaaataaaatcctaaattttggctgggcgcagtggctcatgcctgtaatctcagcactttgggagtccgaggcgggtggatcacgaggtcaggagatcgagactgtcctggctaatacagtgaaaccccatctctactaaacaaaatacaaaaaattagccgtgcgtggtgacaggtgcctgtagtcccagctactcgggaggctgaggcaggagaatggcgtgaacccgggaggaagagcttgcagtgagccgagatcgtgccactgctctccagactgggcaacagagtgaggctccatctcaaaagaaaaaaaaaatcctaaattttagatgagaaggccccagagctccaccacagcaatctgttgctgtgggtttttcccagaggcaaatgaatctcccaggcaacatctgatatttcctcctaaatccaaccctccttcaccctctggctggcagaaatcatccaggttgccctaaattacaagacaccagactacaattgattgtacaaatgacagttgatacaacataatgcttttttattttgttattttcatttttttgagacaggttcttgctctgttgcccaggctggagttgcagtggtgtgatcacagctcactgcagcctcgacctcctgcactcaagcaatcctcccacttcagcctcccaagtagctgggactacaggtttgcaccaccatgcttggcggattttaaatttttttgtagagacagggtctcaccatgttgcccaggctggtctcgaactcctgggctcaagggatcgatcctcccacctcagcctcccaaagttctgggattacaggtatgagccactttgcccagctggttttaattttcaattctggacatgatttccagctcttaggggagaaagacctcctaaagcaaaacgctcacctaaggctgctcagttttcctgctgtccaaagactgagagagtctggaaaacaggagcagcttttccaacccaaaagtgtggttatgaggactaaatgagactgtttatgtaaacacctttgcaagtgataaagttcagtataaacatagtgtctagcagactgtctggtgaaaagcaatatgtcactctctagacgaatggaaataaaccaaaaaaacctagggtcttatcatgaggacatctttggaaaatatgtcaggatcaggccatgaaaatttctaagtccttctgcagctgtgactttctggcatcccaaagtccagggcggaggtacagccgcccaggratttattcctccataactttgagctccccaaatccccacgaagcccaggaatgatgtgactgcagggcatgtgggcccattggcaccaacagcccctccataaatcaaggtctcacttatgctggcctcagactgctttttccaaggtgacctgggcaaactgaaagggtagttgcttatctaggggtggcatctgcctttgagatgaaagaaccctgaaaatgctaagaggaccaattctctagaaatacattcctttcaggaagagctttcttcagctcagacgacaattcagttaggagttagagacagagcggcagtcttcccatatctcagccagtttgggtgacccaagaggccccatggggcagaccagaggggccctgttccagtcctgggtcagcrccagtgaaagtcaaggtgacctcagcattgttaccagttatccacaagacagccacgtgaatcacagaatcttaaatcagagggcccaacaccctaatggttcaggcaaggaaactataggtcaaagatggggaggggcttatccaagktcacatggccttgaagagaatattccaggttagacctagaggttcaggcctcactacacaccccctttaatgaggccacactggcggtatagcggggttccagtcaaggactccagaaacagcccatccagccaattgacctggccatctcaatgtctccagtagcatccacatcggctgtgagagtggaaaccaaagactatagaaaggcgcccttcacatgtccaaaacaagcagacagaaaggggaaaaaaaaatcactcctacgaaaccccgggacctgcaaggttaacaatctacacaaacgcgtggagtgactgaagaggcaggtgccttggaggctccaggccactcctgcccaaggtaagtcccaagagtgaggccagctctgagcagatccatggagggggctggaaaaagaagctgagatgactaaaatggaaactcagtaaaaaacaaaaccaaaaaactttcttcacagaactgctgtggggattaagtgggataatggaccataatgtttggcacagagtagaaatggtttcttatattaaatggctaacaaagccaccaaggactgggtgtccttctctgggcacaccctctcgtacagaacagagctcacagtgtctagctgtctgctcacttgccgtctccaccactagagagtaaattcaatgagcagtgaccacctggcttgctcattccctgcagcatcccagcacttggtgcctgccacatagtagccactccattcgtatttatgaatgaatgaatgaacgaacaaaagaatggcacttttgccagccacccttgaaatcacctcagctcattcaccaactgcccagtttgtttgggactctcagtgcagaaacctgggcagcctcgggcaagctgcacggtatgcgacagaaagggctgactcaagccagtaagcgtcagagatgaataataagactgacaaattcttagggaggctaggtgtggtggctcacgcctgtaatcccagcactttgggaagttggagcaggatgattgcttgagcccagcctgggcaacatagccagactccatctctacaaataattttttaaaaaaattatccgggtggccgggcgcggtggctcatgcctgtaattccagtactttgggaggccgaggtgggtggctcacgaggtcaggagttcaagaccagcctggccaagatggtgaaaccccatctctactaaaaacacaaaaaaattagccgggcatgatggcggacgcctataatcccagctactcgggaggctgaggcagggaattgcttgaacccgggaggcggaggttgcagtcagccgagatcgcgccactgcactccagcctgggagacagagcgatactccatctcaaaaaaaagaaaaaaaaaaaaactacccgggtatggtggctcacacgcctgtagtcccagctactctggaggtgggaggatcgcttgagcctgggaagtcgaggctgcagtgagccaagactgcacaccggcctgggcaacagagtgagaccctgtctgaaaaaaaaaaaaaaaattggccgggcgcagtggctcatgcctgtaattccagcactttgggaggccaaggtgggcggatcacgaggtcaggagttcaagaccagtctggccaagatgatgaaaccccgtctctactaaaaatacaaaaaattagccgggtgtgatggtgtgcgcctgtaatcccagctactcgggaggctgaggcaggagaatcgcgtgaacccgggaggcggaggttgcagtgagccaagatcgcgccattgcactccagcccgggaaacagtgcgagactccatctcaaacaaacaaacaaaaattccaggaataaagaggttgaaatcggggcagggacccggataggatggctccgccccatctaagtcttagccccaccccctgaaagtcgccctgcctctcagactcctcccctttctgagaaggtcacgggggaagccaaatgggcatgcgccgctactgcgctattgcgcacgctcgctgtgcttgccccgccttccctccgcccacccgggaaacckgaagccgcctcccacttggttgctcgtacgcggctagtgggtcctcagtggatgtaggctgggcgccgcgatgttcgacgggacaccggcggagagcgacctcggggttaaggggtggggctgacgtcaggarccaagatggcggcggtggtcgcmctctccttgaggcgccggttgccggccacaacccttggcggagcctgcctgcaggtgagtcctggagcctcagagagggaaaagtcaggaaagccacagagactgcctggagctgatggggctgcggagagactgaggaagcatagggcaaggcctcagggagatggaggacctcctccccctggtgcagtgctttggtttggcttcgagcatccctgtcaagttatstttctgcgcctcgcagcagcttgtgagttagggcacgggcaattttttacagctaagggtgcggggggggggacgttcagaaaggggacttgaattgctcaaggtcacatggcaagcgaatgactgctggaaccagaatttgaatccagacattggagttccaagccctttttctgccaccaaactatcgcctctgtagaaaagggagacctgcggggtgtgaaggatgggaattgggaagcgaggtaattcctcaagggtgcgaggttgaggaccgggatgggtgaggaaaggacatgtgaattgttggggacagggcaggggaagggagagatggagggaaatgcacccagccccctacctcgaaggatcccggaggtgggtggtgggggttgcaggaaagactgggttccttaaagcagtgtcaccacagtttcactagtatcctctcagtgtttctgactctaaaggtcatataataatacggacctcatagagttgacatggaatgacaggtagagggcttggcgctgttcttgtttattactatgccgtgtgcagtaacagattttcccacgccccttgtatggccaagaaacaacacatttctgacctgccttctaagtgggaacatttagaaggggaagggaaattgcttttgtatacataagggactaaggatttgcaaatcctttctaagtctgttcctcttctgggattctcaacaacccctttaaggtgggcaagcaagaatccttaccctcctttttggagctttgaaaacttgaggcccccagaaagaaaatttttggcttgctcaaaatatcacattcccaagaagcagacctgaggcagttttttaacatggtaccagaaaaactccttagcatagatcttgggacatggttggtgtccaagaaattttagttcctcttcctctcttgcacttaaatgaggacatctttcatcttaagtgcctgctatggctgcataacacagtacatattgcccatgttccaatcctggttctatccagcatgctgtgtgtgaacttggatccactctgtctgcatcagcctttctgaaaaggggagatagaggaagaagacagcctaccagagcctcaagctgacatcctctcagtattaaattgatgattgataatgagcttgtttacctgttccttttatagttgctgagcaaacaattaaattgtgagagccccactaacgagagagytccaagcccctcttctaagaatgcattgtagaaaaggctaatttcataggtcatttttgtaattccaggcaaggtctttgcagggcctcctgagggcaacagaaaatagaagagccccaaggcctccccttccttgtgggaatgtacatgtatacccacaaaagccacctcaaaagaattcagtaatgagcttggtgtgttacctgtgggtaacattcaggttcaggttctgaattctttttatgcttatagtctgaccactgaaccacaattctgcctgtaagtatttgactgtagtatattaactattgtttgtgttgccttatttcttcatctggactatgaactcctttaggacaagaactacctacttaaaagtgtgtatcttgccagrtgcagtggctcatgcctgtaattccagcactttgggaggccaaggtgggtggatcacctgaggtcaggagttcaagaccagcccggccaacatggtgaaaccccgtctctactaaaaaaataaaaaataaaaaaattagctgggcgtggtggtgggcgcctataatcctagctacacaggaggctgaggcaggagaattgcttgaacctgggaggtggagggtgcagtgagctgaaatcgcaccattgcactccatcctgggcgacaagagcgaaactcagtctcaaaaaaaaaaaaaaaatttaaaaaatgtgcatcttgttccttaggctggcagggctaggatacctatttacaaatcagaataatacaaagactgataaggttgccaatcttgtagagcaaaaattwttttctgggctatgctagaaacttgaccccccctcccccsggttatcttatgaggcagatattaatactacccaccctttacaaaggaagaaatagaatccgaaaagctaataatttgcagaagaatacacagcttgtaagtgatagagcttggatttcaagcatcaccaatcacacttttcagcaagcctgcaccttgtattttactcaggcttatcttcatacagtcctttttgctttcttcctctctatttccccaccttcttctctgkcctccaaatctttatccactccatccaactccaagcctgcaccctaaggacactttactggaggarcaacaaccagccttcagcaccattcagaattcacccttctcagttcagttgttgcttaccttgcttaaattataaactatgaaattcatactatccaagatttcctaggaatgtactttctgccttgaatactcattagtctttagattaacgtaaaaatgctttcaaggggccctctttccttttggatttgtagtataaattgctgggcaggtaacaaggggaaaaaaatcatatagtctcattgtatgattagagcaacaacttcttttgttccttggatctcattgtgaaatggaattatctttttgcactgttgcgttttatgtttgcrttttcaccactggttataatggctaaaaggttggatttytgaatcaagtgacctgtgttgctatatgatcctatcctcgtcttttaactgggaacaacaaaacatttttcatagagatgttataaagattagagattatttggcacygtgtgtgacagattataaaggttcgatgaatgaaatctggcaaatttttagatatatgtattcaacgaattttttggtggaacacagataacataatcctgagaattaactctttgtacagacctcaagatgagcaaagctctatcactttcagaaccatgaccactctggtgattttgatttcagaatcttctttcattctggtaaaccccctttgccccaccaaatattgtatgaaatacatttttttttttttttgagacagagtcacgctcacgttgttgcccaggatggagtgcagtggcggaatcttggctcaccgtaccctccgcctcccggatttcaagcaattctcctgcctcggcctcccaagtagctgagattacaggtgcccgccatcgtgcctgtctaatttttttgtatttttagtagagacggggtttcaccgtgttggccaggctgatctcraactcctgacctcaggtaatccacctgcctcggcctcccaaagtactgggattacaggcatgagccaccacgcctggcctataaaatacatttttgacacaaaacaaatttaaattagttgtactgaaaaaaaaaaaatgatgacattttrgggcactccaaaactgatgttgggatatgtcgacttagatattcagtgtagtacatcctggcattgctcttatttcacatcattcatatgataagactttttaaaaatttaaattagctctaatacaaacttagtctcttttggaaagataatacgtgatcaattatccgtgtagagtggatatgaaacagatatttaaatgttataaagaaatgttgaagggaaaacctcattgcaggtaaccacagtcatcccacaggccttgtggttctgataccsagcttgatagagcctaatgcctgttgcccactgacaatactaaatcaggctttagaactagggggttatgcctggcacagtggctcacacctgtatgtaatccagcactttgggaggctgaggcaggtggatcacgacatcaggagttcaagaccatcctggctaaaacggtgaaaccccatccctactaaaaatacaaaaaagttagccgggcrtgtgacacgcgcctgtaatcccagctacttgggaggctgaggcaggagaattgcttgaacccaggaggcagagagatctcgccactccactccagcctgggtgacagagtgagactgtctcacaaaaaaaaaaaaaaaaaaaaaaaaaaaagaactaggggattatrctccagtcccagattctgtttaaagcccggttaggggccaggcgcggttgctcacacctgtaatcccaacactttggaacgctgaggcaggtggatcacttgaggccaggagtttgagcccagcctggccaaatggcaaaaccttgtctgtactaaaaatacaaaaattagctggactttatggcacatgcctgtaatcccagctacccgggtggctgagacaggagaattgcatgagcctgaggggtggaggttgcagcgatccaagatcgcgccactgcactccagcctgagcaacagaatgagactctccaaaaaagaaaaaaaaaagtccaagttagggccagacacaatggctcacacctgtaatcccaacactttgggaggctgagatgggaggattgcttaagcccagaaattccataccagcttagccaacatggcaagaccctgtctctacaaaaattagctggacatgatggtgtgcacctatagtcccagctacttgggaggctgagtcaggatgatcgcctgagcccaggagttmaaggctgcagtgagccaygatctccagcctgggcaataaagctagaccatgtgtctataaaaataaaaaataaaggccgggcaaggtggcctgtacctataatcccagcactttgggaggccaaggcaggcggatcacctgaggycaggagttcaagaccagcctggccaacatggtgaaaccccgtctctactaaaaatataaaaattagctcggcgtggtggcaggcacctgtagtcccagctactcaggaggctgaggcagaagaatcacttgaagtcgggaggtggaggttgcagtgagccgagatcgcgccattgtactccagcctgggggacaagagtgagaccccatctcaaaataaataaatamataaatattttaaaaaataaatgaaaaataaaagtgtccaaattagaagtaaaaacttgaagtagccccattttttaaaaggcatattgtcccacttaccctactatctgcctcaggcacagcagccacccactctggaaaatagttttgtcagttgcttaaaaaaaactaaacttgtagctaccatacagcccaacaattacacacctgggtgtttatcctgagaaatgaagatgtaacgttcacacagaaatttgtccacaaatgttcatctcagctttattcatgtcaccaaaaattagaacacccccaatgtccctcagtagttacatggttaagcaaattgtggtacatgataccttggagtgctactcagctataacaagaaaaaagctattgctgtacacagcaacttggatgaatctccggagaattcggctgaataaaaaaagccaattccaaaaggctacataccagatgattatattgatataacattcttgaaatgaccgaatttgagaagtagagaacagattagtgattgctagggcttacggagtacaggggaggtagggtgggaggaagtggacagggctataaaagggcaatgttagtgatcctgtgcttatgggaatgtcccctatcttgactagcactgtcagtattctggttgtgctggtgtgctacagtttgcaagatgttcctgttggggagactgggtaaagagtatgtgggccctggcatggtggctcatgcctatatcccaactcttcgggagggccaggcagaggatcacttggggccaggagttcaagaccagcctaggcaacacagtgagacccctatctctacaaaaataaatgtaaaaaaactaactgggcatggtggcgcatgcctgtagtcctagctactggggaagctgagatgggaggatcgcttgagtccagaaggttgaggctgcagtgagctgtgatcatgccactgcacaatcagtgacagagcaaaactctctctctttttttttttttttttagcttgagtttcactttgtcacccagggtggtatacagtggcacagtcttagctcactgcaacctttacctcccaagttcaagccattctcctgcctcagcctccctagtagctgggattacaggcacacgccaccacaccctgctaattcgtttttttgtatttttagtagggayggggtttcaccatgttggctgggctggtcttgaatccctgayctcaggtgatttcccaacctcagcctcccaaagtgctgggattacaggtgagaagagtatgtggagtctcagtattattttcttctttttgttttgttttgtttctttgaaacagcgtctcactctgtcacccaggctggagtgcagtggcgcaatcttggctcactgcaatctccgtctcccagggtcaagcgattctcctgcctctgcctcccgagtagctgggattacagacatgtgccaccacaccgggctaatttttgtatctttagtagagacggagtttcaccatgttggccaggctggtcttgaactcctgacctcaagtgattcgtctgtcttggcctcccaaagtactgggatacaggtgtgagccactgcacctggcctcagtattattttctataaatgcatatgaatctataattattaaaaaataaaaaggttggccaggcacggtggctcacgcctgtaatcctagcagtttgggaggccaaggcaggcagatcacctgaggttgggagtttgagactaccctgaccaacatagacaaaccacatctctactaaaaatacaaaattagccgggcctggtagcacatgcctgtaatcccagctactcgggagactgaggcaggagaattgcttgaaccggggaggcggaggttgtggtgagccaagattgcaccattgcactccagcctgggcaacaagagcaaaactcagtctcaaagataaataaataaataaatagkttaattttttaaaaaagcatttaactatggttatatgcagtaacatatgaatctcagaagcattatgttgagtgaaagaagctagacatgagactacgtaccgtatgatgccatttatatgaattctgtaaaaggcagactcgtgatgatagctgatcagttgctaagggtaggaaaaggggacttatgtttgccatcaagggcacaaaagacctttttggatggaaatactctgttgtaattgtggtaggattacattgctttgtcaaaactcattatacccttaaaattagtgaattttattataatgaattataccttattaaatctcacagaaaaaagaccaaaaaaaaaatgggacattaagcaagcaaagtccactggagttgataccttcaggaatctttcctctcacttcctcccaaataccacaaggtggcattagatgttcatgtcagtttacaaaatggggttcccggtgaaaaacatttgtagaaatggctttccttttgttgatgattttagccagcttggtgataaggtaaaacatagctttcatcttaactttcattttcttcatatrttttcttcttttctactgttagctgatgtttgtattttcagcttcagttaatacgggacactttaccaagaaataatgttactggtagacggtcttgaccacaagtcgtcmaggtttttagcatgttgaacaaaaaattggacaaaacacacaarcaaagcaacagaagacgaaagcatagatttattgaaatgaaagtacactccatagagtaggagtgggatygagcaagtggttcaagagccccagctgcacagtcttctgggattaaagtaccctgtacgggtttcctattagttacaccctatgcaaatgaagacttggcccgagacgaatcagaggctgtagtgaagactccctgtctctaaaccctgttctcctgcctcagtaataaacaccactgcatctttttgtaattagtcaattaaccttccgagtttttacttttctatatcagtttattttaaaaattagcagtcctggagtatagtcttttctttctttktttcttttttattttgtatttttgaaaaagagtctcactctgttgcccaggctagagtgcagtggcatgatcttggctcactgcagcctcaacctctcgggcccaagcagtcctcccacttctgcctcctgagacgcacactacgacacccagctaatttttttattttttgtagagatggggttttgccatgtttcccagactgctctcaaactcatgggctcaagcaattctctcacttctgcctcccaaagtgctgagactgcaggcatgagccaccaccctcagaccacaccccacactccttccccttaattctggtttgtcaagcctccacttagatgacatgtgaggaagccttstctgactcttcactcattgaagtctctgctgtattcatccagagctccctgtactttcccaacagtatcrctctttatattcatcgtgaatgtttaatttaactcttgttcactacaaagtaagttctgtgaagatgaaggtttttgtgtattaagtgctgtgtcactagcccctaataccatgtctgatatattagcatatgataggtgcttaatacttgttggatattgaatgcctgccttttctaagaagattatgtrtcagtaatgtgtgagtttatatccagcgttacatctgttgtgccagcaaaatggaattatcttgtatttctaatttttttttcctttttgtgaactttaaaaaatttcaggcctcccgaggagcccagacagctgcagccacagctccccgtatcaagaaatttgccatctatsgatgggacccagacaaggctgragacaaacctcrtatgcagrcttatgaagttgaccttaataagtgagtatctctgtgaaagccagctattgaagragagttcttgatttgatttagggacatgcttttcacatccttggaaggcttaaaaatctgagatcatccgatggctctgtttttaaaacaagaatgagcttgggccgggcacggtggctcacgcctataatcccagcactttgggaggctcaggcgggcagatcatctgaggttgggagttcaagaccaatgtggccaacatggtgaaactcccctctctactaaaaatacagaaattagctgggtatagtggctcatgcctgtaatcccagccactcaggaggctggggcacaaaaattgcttgaacccaggaggcagaggttgcagtgagctgagatcatgccattgcactccagcctgggcaacagagtgagactctgtctccaaaaaaaaaaaaaaaatgaggttgttacctgattcagaaraataataccaaaataattcccaaatgaaagtatgacaaatttctagaaatactggtataattaactttatgcacagtatttaaagtcatttaatatattaccatttttttaatgctgaatgtattgattatatcttatacatctggacctgtgttttctataataataacagaaccgccagaaacttgccttgaatggacaaggtagggatgtggttaaaatgttaaaaattggactggcgtgttagttttctatttctgtcagagcaaattaccacaaacttagtgacttaaaacaacctaaatgtattatcttatagttctgtaggtcaaaagactggtatagtctcatcagactaaaatcaaggtgtcagcaggctgcattcctttctggagcctagaggaaaatattttttgctcatttgcgctattggtggaatgcagttccttgtggttgtgagcccgaggtctctgtcattctgctgactgtaagctgagggctgttccaagcttccagaggctgccgcactccttggctcttggcctcttcttccatygtcaaaagcagcagcagcaggttgagtccttcttcacatcacatctctcaaaaccactcttyttccaacatctttcacttttaaggaactccacagttagccaaagaaaagaaagaatctrgcaagttagtctctagcctcctgctgctccactccacgcccccatataaccagaactgttctctgatctgttttatgtgtaagtgaataagtgttttatttgtttcaaacaaaagcttctgtggcaccaaaaaaaagtttgaataccacgaatactctaaatgcttaytttgactttctgtggtgacaagtaagtgctgttaatgaggtagcattaattgatatataaccttcttaaatagacaaaattttcaaatactcagcaaccaaaagtccctagcaaaattcaaaggaatagaaattgcacagaccacagttttggaccgaaatacaataaaactaaactcatattaaaaatataaacaggccgggcgcggtggctyatgactataatcccagcactttgggaagccgaggcaggtggatcactcgrggtcaggcattcaagactagcctggccaacatggtgaaaccccatctctactaaaatataaaaataagctgggcgttgtggcaggtgcctgtgatcccagctatttgggaggctgaggcatgagaatcacttgaacctgggaggcggaggttgcagtgagccgagatcgtgccactgcactccagcctgggtgacagagcaagactctgtctcaaaaaaaaaaaaaaaaaaaaaaaaaaaaactcataaaacaaaaaaccctactgcttagaaactaaaaaaaagtacacttctaactatttgatcaggaacacgtaaaaaatattgccagatacttagaaaataaagacgttgcaaatcaaaacttagagaatgtyagagaatgtggctaaaactggaagagttaaattcctttttttttttgagtcagggtctcgctgtcacccaggttacagtgcaatggcatgctcacggttcactgtagcctcaacctcccaggctcaagcaatccacctgcctcatcctcctgagtaactgggactataggcacatgccaccacacccagctaagttttgtattttttgtagaaattgagtttcactatgttgcccagcctggtctcaaactcctgggctcaagcaatccacccattttagcttcccaaagtcctaggattacaggcatgagccacagcacccagcccataacgattttttagtgataaaaaatttaaagaatctttgggtttacttccagttttgtcacagtagctctcatcagactaaccctcctacaaataacaatgatcaactccggaaaaaaatataagaaacaactgcctgaacagtagagaaggaccacgagtgggcagacattggaggggagttgatacttggaagaatgaaatggcattggacaaattaccattttactcttacatgattttgctgaggacaagtccaagttggtatgggaagtaacgggactaacagttggatggaaaaccacaatccgactgggtgcattggctcatgcctgtaatcccagcactttgggaggccaaagcaggycgacatggtgaaaccccatctctactaaaaatataaaaattagccaggcatggtggcacatgcctgtaatcccagccacttgggaggctaatgggggagaatcacttgaacatgggaggcggaggttgcagtgagccaagatcacaccactgcactccagcctgggcaacagagtgagactctgtctcaaaaaaaaaagaaaaaaaaatcttagcttgaataacgagaagacacattttgggccttccacaaccactaggaaatgagggggaaagcctagaaagaagagaaacacagaggaggagcactaaatgctgttcatgaactctgcccacatcttgcgtgcagccatattaattgcctgtgtaaaattttaaartccacacttttcagaaaaacataatgcaatccagattctctacagcatattaatttttcttttttttcttttttatttttttattttgagtctgagtttcactctgtcacctggactggagtacagtggtgcgatcttggctcactgcaacctccgcctcccgggttcaagcgattcccttgcctcagcctyctgagtagctgggactacaggcgcgcgtcacacaccgtctaatttttgtagtagagttggggtttcgccatgttggccaggctggtcttgatctcctggcctcaggtgatccacccacctcagcctcccaaagtgctgtgattacaggcatgagccaccgcgcccagtggaatttaaagaatttttaaatttcctcatagataaaggaaattatgctcataatgaaataggaaatttcagtggagaagtagaaactattgaaaagccaaatggaaaatctagtactgaaaaatataatatttgaaaaggaaaatttaccggatggccttaacagcagattggaaatggcaataagaagaatcagcaaacttaaaaatattaatagaaattatatagttttttgttgttgtttgtttgtttgtttcttgagacggagtcttgctctgtcatccaggctggagtgcagtggcgcaatcttggctcactgcaacctctgccttccaggctcaagcgattctcccacctcagcctcctgagtagctgggattacagacgtgcaccaccacgcccagctaatttgttgtatttttagtaaagacaaggtttcgccatgttggcaggctggtcttaaactcctgacctcaagtgattcacccgcctcggcctcccaaagtgctgggattmcagacgtgagccaccatgcccggccgaaattatctgttcttaagaaaaagaaagatttttgaaaagggaaagcgctcctgtgatctatggaacagcatcaaaaggtctagggcaggcatggtggctcatgtctgtaatcccagcactttgggaagctgaggcaaaaggatcacttgaggccaagagtccaagaccagcttgggcaacctgtgagaccttgtctctactaaaaaaattttttctttgaaaaattagccaggcgtggtggcacatacctgtagtcctagctacttgggatgctgaagcaggaagacagcttgagcttaggaacttgaggctgctatgagctataattgtgccactgtactccaacctgggcagcagagtaagaccatgcatgggtgagtggatggatggatgtaacacacatgtaattggacttccagaaaaaatggagagaaagaaaaggcaaaataaatatctatttgaagaactcrtggccaagaatttcctgagcccatgaaagacataattyacatatccaagaagcttagtgaaccccaactaggtaaataaaaataaaactatgccctgttccatgaagtcaagttgctgacgaccaaaaataggagaaaatcttgaaagcagctggagaaaaacaacatgttacatacaaggaaaccaggtgaaaaattgctgacttctcatcagaaactagaggccaagagacagtgaaataccatctttaaagtactaaaagaaaaattgtcagcctggaattccacgttcagaaaaaaagattcttcaagatgattatgaaataaaaacattttcaggtaaacagaaaagaaaagaattcatggccagaagaccagtactacatgaaatgctataggaagttagtcaggctgaggaaaaataataccaggtggaaacttggctcttagaaaaggaatgaagagcgctggacatagtagatataaaaggatttttcctcttaattttgttaaaattaatatgactgtttaaagcaaagttattatattatattctgtaatatataactcacatagatgtaaggcatatgataactatagcgtaggggctgggaacagcaggtaaatagacctataataatgtagcaggattcttgcattacataaagttgcacaatagtaactctaaacaggtataaagagttaaagatgtaaattatgtaaagtataattctagagtaactttttttcttcttctgagacagggcctcactctgtcatccaggctggaaggcagtrgcacaatcatggctcactaaaccctcccaggctcaaccaagcaatcctccctccctgagacctcctaggctcaagcaatcctcccacctcagcctcccatgtccctgggactacaggcatgtaccactatgcctggccaattttttttttttttttttttttgtagagacagggtctcactatgttgcccacactggtctcctgggctcaagcagtcctcctgcatcagccttccaaagtgctaggattacaggtgtgagccaccatgcccagccaagagtaattatttttttaaatgcaaagagatatagctaaaaagccaatatataaattaaaattkatttctaaaaatatttacttagtctaaaaatattacttagaataagaaaagaagaagagaacagcagcaaaatgatggaacaaatagtaaaatgatagacctaaatccggccacgtcaataactgtattgaatgtaaaaactattaaatactcccagttaaaaagccaacagtgtcagaatagatttttttaaaaaaagcaaaacccaaccatatgctgttttaagtgcaagaaaaagcgcaagaaaaaataaagaaatacatttgaaaatcaatgtgattcaccatattaacagaataaagggggaaaacccatttgattgctttaatatatgcagaaaagcatttggcaagattcaacactcattcatgatttttaaaaatgataatgggttaaataattttcacagtgtgtatattttaacagaataaataaataaaactataaggaatttgaattaaaaggaatagtcctaattttacttaaataataactgctaataggaaaagaagggaacttcatcagccagatgaagactgtgaaaatcacagctaatagcatactttattgtgagatattgaacactttccccataagatcaggaataaggaaggttgtccactctgtatttgagttcaacattgtactgaaggttctagccagtccatgaaaggcaagtaaaagaagtagaaggcatatgtaagcttggaaaggaagaaattaaactaactgtagtcacaggtaacatgattgtttacatagaaaatttcagggagtctacaaaactaaaagaataagtaaatttagcaaggctgcaggatgtaaggtcaatatgcaaaatactatttgtgtgtgtgtgtatttcaatggctacagataattctatttatgctaacatcagccattcaaaattttactggaggcttagccagggaaattgggtgagaaaaagaaagaaaaggaaattggaaaagaagaagtaaaactgtctctcatagataacataatcttttacacaaaaccttgggcaggctcagtggcttgtgcttataatcccagcattttggaaggctgaagcaggagaattttttttttttgagacagagttttcgctcttgttgcccaggctggagtgcaatggcacaatcttggctcaccgcaacctccgcctcccggattcaagcaattctcctgtctcagcttcccaagtagctgggattacaggcgcctgccactacgcccagctaattcttttgtatttttggtggagatggggtttctgcgtgttggtcaggctggtctcgaactcctgacctcaggtgatctgcccacctcggcctcccaaagtgctgggattgcaggtgtgagccactgtgcctggcctgaagcaggagaattgcttgagcctgggagttggagaccagcctgggcaacaaaatgagacccccatctctacaaaaaagcaaacaaaaaattagccaggctgggtgcgatggctcacgcctgtaatcccaacattctgagaggccaaagcaggcagatgacttgagtccaggagttcaagaccaccctggacaacatggcaaaaccctgtctctactaaaaatacaaaaattagccaggcatggtagcacacacctgtaatcccagcttcttggaaggctaaggcacaagaattgcttgaacctaggtggcagaggttgcagtgagccaagatcacgccactgcactccagcctgggcaacagagcaagactgtgtctcaaaaaatttgccaggtgtggtggcacactcctgtagtccgagctacttgggagggtggggtgggaggatcacttgaacccaggaggtcgaggctgcagtgagccatgattccatgccctacactccagcctgggcaacagagggagacgctgtctcaaaaaaaaaaaagaaaagaaaatataagacattgccccctaggaactattagaactaatgaacaaattcagcaaggttggaggacacaaaactggtatacagaaatcaaatgtagtttagttttttattatgcataatttgtccatgtttatttcaacctatgtctgtcagtcttcattttatattgtaccatgttttaattatagttctatttccttctaatccgactctgaaaccctactttgtagctatgtatacacacacaaaaaatagctatattctttcattttcacaacagcataattctttttctgaaaatactggcgtgtagcagatattagcagataaatgtatttttctaggctaggcatggtggctcacacttgtaatactagcactttctttgtgaggccaaggcaggaggattgcttgaggccaggagttttgagaccagcctgggcaacaatagcaagacttagtctctacagaaaaaatgtgtgtgtgtgtgtgtatacatatatatttatatatgtatttatatttatatattcatatttatataaatatttatatttatatattcatatttatataaatatttatatttatatattcatatttatataaatatttatatttatatatgtaaaaccctgcttacctagaaaaaagcctgtaagtactgttaaaaaaacaaaaattggatttctatacactagcaatgaacaatcctaaaatgaaatttaaaaactattttccatataacagcatcaaaaaagaaattcttaggaacaaattatatgggcaayaagacaaaaccccatctctacaaaaaaagttagctgggcttgatgaccttcctgtgcctatagtcccagctacttggaggctgaggtgggagaatcacttgagcctgggaggtcaaacctgcagtgagctgtgatcacaacactgyactccatccagcctgggcgacagagtgagatcctgtctcaaaaatcaaataagtaaaagacttatatgctgaaaaactgtaaaacattgttgaaagaaatttaagaagacataaataaatggaaagacatgccctgtttgtgggttggaagacytaatgttgttaaggaggcagtgktctccaaattgatttccagattcattgcaatccccatcaaaatcccacctgccttttctgcagaagttgacaagttgattctaaaaatcttatagaaatgcaagggacccagaatatcaaacaattttggtatctatgtaaaatctgagaaaatttatgttgtactctttaatgagccctacctattaggaaatttagcatgaaacagcttaaagagaggactttgactttttaatatttttctctgtcccagtatgatctgcaggattactttttacctttgatttgaatttatttatttatttatctatttatttatttatttttttgagacagtctygctctgtctcccaggctggagtgcagtggtgcggtctcggctcactgcaacctccgcctctggggttcaagcaattttcctgcctcagcctcccaagtaattgggactacaggcacgtgcaaccacacccagctaattttttgtatttttagtagagacggtttcaccacgttagccaggatggtctcaatctcctgacctcatgatccacccgccaaggcctcccaaagtgcctcccaaagtgctgggattacaggcgtgagccacccacctggccaatttgaaatttttataggctgcaaatattagcctttgtaatgtaaaaaaaacaaagatgttgttgtcatttaaaatatgctaggacaagaacaggcagatcattagaataaaaatgtagcaacaaaacagactcaattttatctaagttcccagtattaaatatgggagaaaggtattacaaataagaagcaaaagaggatttagtcagtgatttgggacaactgatacagtttttgcagttttaggggagtaacttaaaattttttttaagtagaaaaaaaygtaaagtatttatcagacctcaggaagggcagtggtctgtttaggcttaaaagtgatagataatgttataaaagaaagaatagccacctttattaatgtaaacatttaactcatgtatgtttaaaattctgttaccaaaattagaagtcaaatagcacattactattggcagtgagggaggaagcagaaatggcaacagatataatatataagagcctcagatcatgaaaaagaatttccaagaccctggtaaacagaggcaaagaatgtggacagactgagtctctagaatgagtcctctggaacagagctttgtgcgggcaggtggtattcgtctcttttattctctgctacatccccagcatctagaacagaacctggcagagtaaatgttcaataaataattgggaaataaagaaaaattagtaaatttatgacaaacattcaacctatgtagtattcaaaagtctcgatttaaaacactgaaaacaataacacttctccagtatcagaatagcaaaggtttttaaagcttccaattcccagtgttagcagaggtccagcagaaaggacgtctacatagtgctgatacaaatacagataatgggccagacgcagtcgctcacacctgtaatcccagcatttgggaaggctgaggcaggtggatcacttgaggtcaggagtttgagaccagcctggccaacatgggaaaacctatctctactaaaaatacaaaaatttgccgggtgtggtggcatgcacctgtaatcccagctactcgggaggctgaggcaggagaatcgcttgaacccggaaggtagaggttgcagtgagccgagatcgcaccattgcctcacacccataatcccaacactttgagaatccaaggcaggaggatcacttgagtccaggagttagagaccagcctgggcaacatggcgaaatcccacctctacaaaaaaatacaaaaattaagctggatgtggtggcacatacctgtagtcccagctactggggggctgaggcaggaggatctcttgaggctgggatgcggaggttacagatctgagatcgtgccactgcactccagcctgggtaacagagcaagaccccgtctcaagaaaaaaaagaaaaaaaatgaaatacagatagtactaaagsaaatgrcgtatttttaagtatatttttaatctcatgcatagaaaattagtgagtggaatgggggcagggtggcaaccagaaaatagatttgtggagcacttactgtatgccaggtactatgaaaaattacatatttttatgtaattttcacagtaaccctgtggtgtaaatattaactctacagataaactgaggttcagagagtaatttccgtagaatcacagtttctgcatgatgattattatagttaaactatgatttatatgtcagatgctgctgtaaagatctcgtgtgtattaactcacctccagcaatcctgtgggatgcaggtgctgctctctgcactcagtggattaaatgcctaggcagaaattaaatcatttgcctgcaagctggtaagtggctcagccatggtgcagaccagtctcttggctgccaggccggcactccaggtcccacgcccagggatgctccgcttagtaccatgtcactgcccttgtatgttctaggaggctcacagtgatttgactgggggactgtgagtgattgggtgtcttttattctctgtactatgtcttctcttatggttatgtattattaattactatttaaaactattgtctacatcctaaaaatcaaactaaaatttgaaataaattatttggaaaaactttgcagggagcttcagaagtaaaaaacaaaaactcggccactgtatggaagttgtgtcatacttgtctactactactttagctttccatttcctagaaatgtgtttgcactgtgatcatcaaaatagaactgtgcagtacttaaaatgtaagaatctgcaaaaacaaaactacagaacaaattccgaaggtgacctgagaagaccaaatggataagctaatacatccaggtgtctccgattatattatgataaagtgtagggaggttgaackttacataaataccactggatatttttctttgttagatgtggccccatggtattggatgctttaatcaagattaagaatgaagttgactctactttgaccttcygaagatcatgcagagaaggtgagcatttcattcctgttgggctccagatacttgtggtcttccaaagaggcttgggctggccaaagctgatagagacatctggaaaacagctgcagctctctgctgggtgaacttgctgtgcaacctaattccttttcttgggtaaatgcatccaaaattctaaccrtggtgcaagttctggtttctgagtttactttccttcaggagcattctatcctgtggttactgcatctggcggtccctgtgagctgctccacrcttcaaggcctagctaggacctgctggctggcaccttccatgctgctgagctcttttattaagggagcagtggagagtttctgtctggcacttatgcttgtccagcaggggagatgtgtgagtctccctcagctcccagcatgacatgtccttggtagctgtgttctggattggctggtacagtgtctccctcagcatgtggttacttgtgctgctggtgccacatgagcccatttgaggcagtgtgcagactaacattttctacatgaatagcaatgtattcattttctgtattagaaaaatataattactgccgggtgcggtggctcacacctgtaatcccagcactttgggaggccgaggcgggtggatcagctggcgtcaggagttcgagatcaacctggccaacatggtgaaaccttgtctctactaaaaatacaaaaattagccggstgatagcggacgcctgtaatcctggctactcgggaggctgaggcaggaacccgggaggtggagtttgcagtgagccaagatcacgccactgcactccagcctgggcaatagagcgagacagtctcaaaaaaaaaaaaaagaaaaatataattactaatgatggtataatagggatataagtggttttttaatgtgaatttaagcaaaacaagttaaagaaaacccaagagatactttaaagaaagttgattcaggtggttctcaggtatagcaaaaattgcacagggtgcagtgaagaccgactggcctgatgtccgtggagccagactgtgtgcccggctctgttctgtgcactggacatgaggtagatgactgtgcttattatctaccttcaatttaaaggtgaggcccagagagggtaatggacttccacaaggacacatagagagtgacttgagagccgggagtcagccaaagctgtcagactccagactccagatctgctctctcaggcactgacttggcttggaacacctgggataaaacaaaagcagagagtagcttgattctgtgaggacactgagcttttttctaagaaaaccttaaaaaaaaaggaaaagccagtattgataccggcccatggctttttatctgttcagctgtacatttcaagcatttcaagtcttttaagacatctgttttgattcagctaatcttatttagcgttgcaaatgctgatggatattatgatagttcggctgagtcctgctgttcagggaacattctgcggcagttaaacagcagccttccccattaagtcctggcaacacaggaaaggtagatgcttttcagtaacctttccctgtaggactctttcagarccaagaacataaggtgtgacccatctggactaaaaaaaataaagcagaattgtatcaattgctactcctttttattcccatcttgtttttcttattttttttttaattcccatcttgtaagagaattcccagggagcctttttgagagaaagttcattggatttatttttttaatttttatgccatttcttgtaaaagcaaactgctctagttggatgccaggtatacataaatgtattgataatatccagtctcttggggaactctaggagtatttgcttaagacacatctttgggttcccttacactctttctaagatttacaggagaaggagagtcttaytgtcttttctagtcttatgaaagtgataaccgactgggcgcagtggctcacgcctgtgatcccagtactttgggaggtctaggtggtaggctagcttgaggctaggagtttaagaccagcctgggaaacatagactccctttccatttaaaaaaaaaaaaaaaaaggtgaggccaggcattcagaggccgaggcgggcagatcacaaggtcagagttcgagaccagcctgaccaacgtggtaaaaccccgtctctactaaaaatacaaaaattagccaggtgtggtggcgggcgtctataatcccagctactcaggaggctgaggcaggagaatcacttgaacscgggaggcagaggttgcagtaagccgagatcgtgccactgcactccagcctgggcgacagagcaagactccatctaaaaaaaaaaaaagatgataaccagtgcaactttctcaagcaatcaggtttctctgacctaatgatcttcaaaaaacagcttcagaggactggcactagaggtttagagtacataatcatttttaaattccaaaacacccaggaaatttccatatacaggaagtaggtccaggctaagaaaattctcatgtcggggtcctgggtcagcacgttttttgtttagtttgctttgctttgcctcagtttcatattagttcattcttctcctctttggaaagtccatgctgagtcagcttttgtggatttcatagccccagggtactatgctgcgtattttatgaagacaatagaagaagccttacctctgtcaagtgtagtggctcaggcctgtaatcccaacacagtgggaggcaaaggcagaaggattacttgaggccgtgagttagagaccagcctgggcaatatagtgagacacctgctctacaaaaaacaattatttttttcttttttttgagatggaatcttgctctgtcacccaggctggagtgcagtggcgcgatctctgctcactgcaaccttctcctcctcagttcaaatgattctcccgcctcaccctcctgagtagctgggattacaggcacccaccacgacttatatttttagtagagacagggggttaccatgttggccaaactggtctcgaactcctgacctcaagtgatctgcccacctcagcctcccaaagtgctgggattccaggtgtgagccacttcacccaacctacaaagaatttttttgaattcgccgcacatggcggcatgtgcctgtagtcccaactactcaggaggctgtggtgggaggatcgcttgagcccagaagtttgaggctaaagtgagctacagtgagctatgactccaccactgtacttcagcctgggtgacacagcaagactcagccaagaaaaaaaaagaagaagagctatctcttaataatctgtatccaggtcacttcaaccttaagatgaccaagacaatgttgatttactttacttttgggtattgtgtctgttagatttgtgttcaaataacagtggctttaaaaaatctaggtttccaggcgtgagccaccacacccacccctactcaggaggctgaggcaggagaatcacttgaactggggaggcggaggttgcagtgagccaagatcgcggcattgcactccagcctgggcaacaagagcaaaactccttctcaaagaaaaaaaaaaaaataggcttgacgggtgtgtggtggcccagacctgtaatcccagtgcttcgggaggccaaggcaggcagattacttgagcccagcagttcaagcccagcctgggcaacataacaaaaccctgtctctgcaagtctcgtctctacaaaaaataccagaaaattagctgggtgtggtgggctacttctgtagtcccagctacttaggaggctgaggtgggaggatcacttgagctcaggcattgaggactgcagtgagctgtgattgcaccactgcactccagcctgggtgacagagtgagaccctttctttaaaaaaaaaaaaaaaaaaaaaaaaaaaaaacaggctgatttttcttcaaaacacgtgacacatggagctagaactgctgtggaaactccatggtgccagcagcgcccaggcctctggcctcctccagtgccatacttggcatgtggcttctaacctcaaggttgccacatggtcatagagtagtttttggaactcaagccattagaaccacattcgaggcaggaagaaggarggaagggagaaaagccaacaggcacctctgtcagaggaatgttgcatgtcagtgctgcccctgatggcacagcaaggaggatccagaagaaagtatttggggcaggactgattccggatatgggtgaggatgtgttaaatgtgtgtctctttcaggcatctgtggctcttrtgcaatgaacatcaatggaggcaacactctagcttgcacccgaaggattgacaccaacctcaataaggtctcaaaaatctaccctcttccacacatgtatgtgataaaggatcttgttcccgtgagtttctgcatctctctggttttgtttttatttgcatggggggcagtgctatgtgtgttacgctattagtttttcagggmaggatttgtttgagtatttaaggctcctcttctagtcagatagtaaatagatgggactgtttcctatattatggcaggaggaggaccacagtgtcactgagagattaggaaaatctccagatctgagacagtgtggccagagtttaattaaagaatttgaatggcagaagataaacgcctagaaaatcctccagcagctcatttggtgaggtttgtttgagaataatggggcacagaattttagaattggaacattcccagaaatgaataatttggccataactacaaagaaatcatgtggaaaatgccagttgggaaagcaacagctgtttatgagtcccactttaatttctacctccctatatttgaacacctttgctgacgtggtgttttcaagggcagaaaggactgtgggattggcaggtttcccaagtaggtgagggagaggtttcctaaccatgcttaacattgtgaccatttttccttttgtaatctttgcatatattcatgacaaaggaaaagagtctggcttctgcctggcatagagtggacgagtagtcagtgtccaagaaatggggtaaataaagctgaggtgatgatggaatctgatccttttcttcttcttcttcttcttcttcctcttaaccacaggatttgagcaacttctatgcacagtacaaatccattgagccttatttgaagaagaaggatgaayctcaggaaggcaagcagcagtatctgcagtccatagaagagcgtgagaaactggtcattagtccctatttattgtttcaatctgaagaatttattgcaaagatgattgccaggagtgtggcttggcagggaacataagctgatgcaagccatttagtgtattctggagaggaactggcacaagggtggggcactcatcctcttagggccgggtgagtagtgtgaacccgtgaatggcccagagtggaccaaggagctagagccctgtgccccgcctgcaggggcgggtggttgctgtgtggctactccmtctttttcaaaagaaaccagtatgtaaattgcctgggctttaaaaagtgaccactaagtcagaactgttccctcactgggggcaaaatgaaacacatatgctggccagttgtaactaccaccgtcctgctttacaaatgggagtgaaatgttaatggcaaaacagagtcatcgatattctttcctgacaccatacttctggtgatctgtggggtgggattattcctggcctgctcactctctgggagttgccattcctgtgtacaagctgtaaaatcttaaagcggaggcatcattatcaagttttcagtctttcttcttctacactacttctactcctctgcgaagaagtcttctctgatttgcatactccctgcatacttgtggacgtgaggtaggaaggggaccaaatggagacagagccccacctgcaggtctgcacagggccaagggcaatggctgtgtcttcttcctttctggatccctaggccctggcgcatgttattttatccataaatattagttatgtaaatactgtaaaaatatatataaattttttaaaaggccagatgcagtggtgcattctgatagtcccagctactcaggaggctgaggtaggaggatcacctgagcccaggagtttgagagtctgagagtttgaggccagcccgggcaacatagcccaggttttgtctctaaaacatatacatatatgtgaatatatgaaaagtatcagttgtatgaatgaataaattaattctaccttttgagacttggtaaatatttagcatcctctcctgttgcccataaaacgttaagaaaggggagtccggccaggtgcagtggctcatctgtaatcccagcacttagggaggccgaggtgggcggatcacttgaggtcagttgttcgagaccagcctggccaacgtgataaaaccccatctttactgaaaatacaaaaattagctgagtgtggtggctcacacctataatcccagctactcaggaggccaaggcaggagaatctcttgaacccgggaggtggaggtttcagtgagccaaggttgtgccactgtacttcagcctgggcaacagagcaagactccgtctcaaagaaaaaaagaaaagagaaaaaggggagtcctagtaagtgtgcccagtctgtcaccatcaagatagtgagggtcagcacagtggcctgcaagtcagagtaagcctgggatgagacttcagagctgctcttctcagactgcagctctgctcctcagtttctacctcccagagtcttgtgcatcccagagtccaggctgaaccgggccctctggcccagcgagtcctttgcattcctaggcaaggctggtgcgtagctagtgaacatctccctgatgtggtattattagggattgaagagttcccctgagcatgtttggttttctagatacaagttgagtattccttatcctaaatgcttgggtttcagtgtttggggtttcatatgttttcagattttggaatatttgccttacacttactagttgagcaccccaaatccgaaatctgaaatccatgctccagtgaacatttcctttgagcagcatattggtgctcaaaaagtttcagattttggaacattttggatttcagattttcagatttgggatgcccaacctgtaatagaaatttactcatttactcatttacataccaaacatttaacattttttggcttccttaaattagtatgctgaacttaataaataattggaaaatgtggagaaatttatgtatgtatttatttttaattgggcagcccccaaaccaaaataggttcagagaggctccatcattttttaaataagctataattttcagcctggggaacatagggcgaccctgtctctacaaaaactttaaaacttagccaggcatggtggtatgcacctatagtcccagctactcaggaggctgagatgggaggattgcttgagcmcaagagttccaggctgcagtgaactgtgattgtgccactgcactccagccaggggcacacagcaagaccctgtctcaaaaaaaaaaaaaaaaagaatttataattccaccaccaaaacataatctctgttaatatttatagtttcctttgttttttgtttattacattatatttttatgtagctgggatcaaaatgtaaatatgcttttatatcctgcttttttcacttatgttattgtgagcattttcttcatattcttaaaattgttcataagcattaacttacactttgctttctactgcttcagatgtatgcaccatgcgccataaaaccatttcactgttgctggacaatgaaattgtttccaattttttactrttagarataaggctagatgaacatctttatccttcaagttctgcccaaaacattctaatttcttattacagatttttctaggagtgggttaaagaatatgactattcttaaggctcttaatcctgtgaccttatgccttctagaccagtggggccagttgacactcccaccagctgtctggacataacatagatttggttgaagactcatggttcaatcacaaccatcagttctgtctcatctgttctcaactgtcacttcaggtgtcagtgggcccctttcattttgctgtttttaatccatttctgttgtttccaaactcagaaagtccggtttgtgtttgggacttgttgggcagattgacccagtgtggcaggtgtgaaagtgcaggaagccagagccagctgccggggccacatcctggttctgctgcctatagtggcacgtccctgggcacatggcctaactcactctcctcgccttggttccttacctgtaagtggaacttgctggagtcacctcayaggattactgtgatgatcagttaaggaaagcgtgtaaggcgcagggcctccgtcaggattggcagtggcagtcactggggatgatgttgatgttcccagtgaaaacctgagggcccttctgctgagcccagggcagaagcagctacagactcctgctgcttcagyccctaggcttttgaatctctcccgtcttgacctcattccaggaagctggaatttatgggagttgtttttgtgttcttgttttctatttcttttttagacaagtgagaggttcttgtttattaaagggaaagtgcactatacgtggatttaagaaccctgggcagatgtttacatttcacttgcaagatctttattaatctgctaaatatctgcaaatcaccccttggattttgctaagaaaattcacatgcaagtaggcactttgttcatgcactgaccccaaaggtaacatttaatcagctgaagacatagcagagtctctcccgtcacaagctcctgcctctcttttctccccatacaggacgggctctacgagtgcattctctgtgcctgctgtagcaccagctrccscagctactggtggaacggagacaaatatctggggcctgcagttcttatgcaggtgaggtgctccttaattgctttaagagaaattgaaactcaagcatccagaagtccaagaggacaatagattgctgtaagccagccattctgaggggcctggtttccttcattgccatccagtccaaacagggtaattggttgcattgtattcacttgctttcggtaaatctggggccttgtctgcaaattgcctttgtttcagtgcagtgagggtcaccccaarggggygcaaaccatgccttgcagatgtttaaaatgtatttccgtttgcctggtggtcagaggctccccctctccctctcataggatttgtaacataagayttgtagcgagcaagcaggggagaaagcagtgtctttgaagggcagctgcccagctatgagattggaagctgtttcccagctaatgaaagcctggatttaggggttgcttagaaagaaaatagtattgatgttcactgcaaagaaagtcactgtctttgttcccagaaagcttgtgcttttttagataygtgcttttcacagactctaggcaactcaaaaaccaacttctctttctcattttcccacaaaaagagaagttacaggtttgtgtgaccacatgagcaatattgattcccagccatgtgaagattgrataatgaagtacactcatacttgtcacttttrccagctgctccgagttggggatgtagaggtcctctaagtaacactgctagagcaggcctatggtcatgtgattaactcrtttcagcctgctgatctcaggctgctgagagcgctgtgtaagttcaaagaatcattaagtgggacaaatactatctgtagacaggtctgttaaatcattcctttactcaragacagcaagtccagcatgggtaggtgccatgaagacagataagagttatatgatacagtccctgccttcaccaaattataagctgggtaggaagctattgagcaatgtgaaataattaggagatgatacccagtgtgtataattaagcacccgggtaccaggtgcagtatggatcaaaggtttgcagggaccattaatcaagtgaagctacaagtgttgggaacctttccttgaaagatggacaagaattaaagagtatggagatgaggcatctaagctgagtgaattccctttcctctgcactcccagagctttgagttgagccagggtgccgctctggcctgttgattggcagctcagctaatcatccctggttttccaggcctatcgctggatgattgactccagagatgacttcacagaggagcgcctggccaagctgcaggacccattctctctataccgctgccacaccatcatgaactgmacaaggacctgtcctaaggtacgtggggctggtgaccctcagctctgcctcagagctgacacgccagaagtagcatgtgctcacaaagaggtgattggcagagagcaaccctagtcatttgagaaggaaagggaccagcatatgcctgtcctttcagtgtgagcctaggggctagtttggctcttagttgcaaggagtagactgactcgggccacctcaggagcaggctttatttgtaggctacacagggacattgtgggagttaaggatgcasaggaacccatgagcaggtacctgcgttcaaccttcccaggaaacagaaagcgaaagccgttggaacgtgggcagctgtgaggacttcatttcttctccatctttctcgcgatgtcagctgctaatctgctctgctctctagcagcctgttctttccttcggctctgtggaggttttctctgactcaaagctctggctttcgttcctcttcctgctcgcatttgctgctgcttttggctcactctggcctggattttgcctcccagcacacttccagcttcagccacccgcctgcctcccagcmcttctcagcacagtttcctgagagggtgtcgcattggcccagctcaccttctcatgcctgcacatcagaggccacagctggctacagaccggctgccctttggccaggttctgtctcagtctgttttgtggtactatcacagaatttcagactgggtaattttataaagaagtttatttgacgcacagctctagaggctggcgccagcatctaacaagaaccttcgtgctgtattaccccatggcaaaaggcagaagggcaagagaaagggagcccaagctcagccttttttttttttggagacagagtttcgctcttgttgcccaggctggagtgcaatggcacgatcgatctcagctcaccacaacctccgcctcccaggttcaagtgattctcctgcattcgcctcccgagtagctgggattacaggcaggcaccactcatgcctggctaattttgtatttttagtagagatagggtttctctatgttggtcaggctggtctcgaactcccgacctcaggtgatccacccaccttggcctcccaaagtgctgggattacaggcgtgagccaccgcgaccggcccttctcatctgttttttttaaaagacagggtctcactgtgttgcccaggctggggtgcagtggcgcaatcatagctcactgcagcctggaactgctggccttaagtgatcctcctacctcctgagtagctgggactacaggcacacaccaccacacctgactaatccaaactcatccttttatcaggaacttactcctatgataatggcaatccatttgtgagggcagagccttcataatctaatcacttcttaaaggtcccacctctcaatactgttgcattggggattaggttttcaacacatgagcttttggggacacattcaaaccatagcaggtgtcagccctggtccagtcagccttgcccagtgggcagggaagggctagggctgtgtggttcrgaacacggctgccctccgagcaaagactrtgggtgatttcactcaaaagttgcagtgagtcagtgggcggcaaggtggaaaactgtagggtggccagttagccgtaaaaaaagatcacactgtgtgtttgaaaacatgaaatccaagctgtagaattcacttattttttgcctggaaaccctctgtgtttccagtggcctcgctgggggagcccacaggcttcagctccctattgcctgggcttccatctgggtcctgtccccaggactgtggtttaccatgattgtgcctgtgaatagctactgacctctgaggcaagttatgctataaaagtgcttggaacagtgcctggcacatagtaagcacccaataaatgtcaccttatgttattttttaaaaaaacatgagtactgggcttgtttgagacagagatagcatcttcagtggtggggcctggctgtgtgtttcttcagaagctctgcgagtgactctaaggtgcattcctggtcacaaacctgtgcatggaggggatgggtgcagcagacaactgagacagccaagaacaggttctctgtgccttgccctcccttctgtaaaacagggctggaagttgggactgagacatagacataggccgatcatgaaactggaagggacttgaaaaccatcaagtttaatccccttatacagatggggaaattgagccccaggtggggaggggagtgactcgccccagatcactgtcaggtcagtgggaaggtaggactagagttaggccgtctgcctccccatccagtgctctttcttcctgcatggattgggtatgtaccaaccttctaagtctaaacacccttactgaccctgtggggaccggaaatacacaggtagatccagattcagaaggatatacagtgaaaattctccctcccactccacccagccacctccctagaagtcagattcttgtgtgaacttcagaggtgttttatgctgcacacaaatgcatatgtgtcctcttctgtctttcttatatcacatttatctgtattttttcacccactatattttggagattatcccatgttggtatatgaagagtgtctttttgaccagcctggacaacrtagtgagatcccatctctacaaacaaaawtttttttaattagccaggtgtggtggcacgcacctgtagtttcagttacttgagaggctgaggccggaggatcacttgagccaggtgttccaggccacagtgaactatgatcacacttcagcctggatgacagagcaagaccctgtcaaaaaaatatatattttttctttctcttcttctctcaagatctcttttctttctttccttttcttctttctttccacaacacttttttaggggggtagacttatccttctaaaatgaggggaaccttcactaacgtcagatgagtacttgtctcattttaccaagtacttgcttggtaaaagcaagtacttggtaaagtacttcctactttctacttcaatgaagctggcattcagtgggtttaattattgtgcctcctgcaaagcagatgttaacagctgtaggggcaaactgcagctaataccaatggtattggccagttgaaatcatcatggttttacaaagggttaayagagagggtagtttcttccacatacttttgagagctggtatatgctgatttctgctgctgcctatttaataatgatgatgtaaaagatttagagatgtctggctgattttgacattggcctgtagtcctagaagagacactaccctgagtgtctttgagcagtcagagagtgcacctctgccctgggcctgtttacctgttagagtgagccacacaagaaggaattcaacgtggcagagctcttgccagagggagctgaccatcttcaaatgttaaaaaaggtagacagaagagagcccttagcccaacccctatggttttgagggacttgatttgcattcaccttgcttggacactgaaccagctgaggaaggagtttcacccaagattgtgggttttccctttcagtttcagttatcatttgttattgattcttttctcttttttcaagggtctgaatccagggaaagctattgcagagatcaagaaaatgatggcaacctataaggagaagaaagcttcagtttaactgtttccatgctaaacatgatttataaccagctcagagctgaacataatttatatctaatttgagttcctttaaagatcttggttttccatgaatacagcatgtataataaaaattttaagaaataaatgttattctactttattaacaaaaaaaaaagaacctgttcctttacttgccgcaggggaatgtgaaggtgccaggagtccttgtccttggagagatggacagggcttcagagctgagcgggggtgggggtaccctagctggaaggaggtgatgagccgtggaactgacatcaggcagggcctgcagcttgttcccagctttgccactcaccagctagacaaccttggacaagttccttcacctctttgctgctccattcgcccatctgtaagatgggatccataattgtgcctacttcattcatctggtatgagaatgcctggcacttattctgaacactcagttagtgttagtgttctgtatcttcccagtttctatagttttcagtaccagaattactgaaaaccaaatcttggtaagtctttggatacgtcggtgaggccaggtttgagattcctccagcacagagcaatgaccctggtcagttgtgaatccagttagttccacaaatgacctcgtggggcctctcactgcaaacatcaactccacagcactgctgccttggctggcatgctcactgcacagccgggcgtggtggctcacgcctgtaatcccagcactttgggaggctgaggcgggaggatcatttgaggtgaggagttcaagaccagcctggccaacgtggtgaaaccccgtctctactaaaaatacaaaaattagctgggcagtgggtgtgcgtgcctgtaatcccagctacttgggaggctgaggcaggagaatcacttgagcctgggaggtggaggttgcggtgaccgagatcacaccgctgcactccagtgtgagcaacagagtgagaccctgtctccacaaaacaaaaaagcaatgcaaaaaaggagaaagggggaaagtaaaagtggaagctcctccaaactcatcccgttgatagcttagacatttccttccacactctacgttattacagttatgcagcatatataaaactttctcccttcaaaagtaaggtaccatagagccaggagctgtggcgtgtgcccctaatccagctactcaggaggctggggtgggagcatcacgtgagcccaagaggtcggggctatggtttgccatgattgcgcctgtgaatagttactgcgctccagcctgggcaacatagtgagaccccattcctttaaaaaaaaaaaaaaaaaaaagcctggaacagtggcttctagcacttttgggaagccaaggtgggaggattgcttgaggccaggacttcaagatcaacctggccaacatagtgagaccctgtctcttttttttcttaacataccaaaaaagattttaaaaataaaggggtatcctatagtctgccagcagctattttttttttttttttgagacagagtcccaaaaaaaaaactgcactccgcctcccgggttcacgccattctcctgcctcagcctcccaagtagctgggcctacaggcgcccgccactatgcctggctaatttttttgtatttttagtagagacggggtttcaccgtgttagccaggatggtcttgatctcctgaactcgtcatccgcccgtctcagcctcccaaagtgctgggattacaggtgtgagccactgcgcccggcctctatttttacctcacaatgtagaagggatttcagtgctaataaagacctacctttttgttgttgttgttttgttgtgtgtttttttttttttttttttttttgagacagagtctcgctctgtcgtccaggctggagtgtggtggcgcgatctcggctcactgcaggctccgcctcctgggttcacgtcattctcctgcctcagcctccagagcagctgggactacaggggcccgccaccacgcccggctaattttttgtatttttagtagagatagggtttcaccgtgttagccaggatggtctcgatctcctgacctcgtgatccgcccgcctcggcctcccaaagtgctgggattacaggcatgagccaccgtgcccagccaagacctcccttatctgtgtgtgtgtgtatgtaaaaatttttggaactcctgcttaagagcactgtggcatgggtgtacccttatttaaccattcccctactaaggcacattcgggtggtccctattcaccttttcatccaaggctgcttttttaagtcgtagctggaaacctctggatcatccggaaaacaaaggtttcatgcatcctgaggcaagcagctgagaaaacgtgtgactcaccgagaatgagccttaatgagcattttctggcttaaagggctgattcaacaagcatctgtctcaggcattatggaaggtgaggtgctggggacaaggatgaacaagatttgttgcctgcctgccacctaggagccaaggtcacaaaggaaaaggaacaaacatcagaaatttcaagaacagggccgtgtgcccctccctacagcatcttggaattcttgactatctcagtgagacacacagtacttggccctgcggcgctgaagcctaagattgtggagtgcactggcttcttgaaagacagtggaacttgaactgcgggccatgtctgtggatagcttctgttccccagctcagacctaatggctttctatcagcctggggaaaggtcacattccttggattcatggataatttgacttggcttctaatctccagatctgtagggaaagatgggtttttctcatgaatgacttttttttttttttttttttttttttggagtctcgctctgtcaccaggctggagtgcagtggtgcaatcttggctcactgcaacttccgcctcccaagttcaagcgattctcctgcctcagcctcccaactagctggggttaacaggcgttacgcagctaatttttgtatttttagtagagacagggtttcaccatgtttgttgagcatactgatctctaactcaagcgatccacctgcctcgacctcccagagtgctgggattacaggtgtgggcaagcacaccctgcttctcatgaacaacttaatgctttgtaaagatgggtccgcaacaactgataagaggcagggtgtagcttaggagtcgccacttcagatcagcgtcatcagaggctgggttgactctgatggtcactctccgcagttgaactccaagttaaattggtatatgttatcaactgatagtttactgcttaatctttcattgaattggagacaaatgttctattgcaacagtcacaaaggcttttccagtaaaactgcagacctgtgtggggaacagtattttgtcctgtatgctacttctgtgcccagtgtgccttcatttacaagataatacttccagcctggccctgtggctcacgcctataatcctagcgctttgggaggtgggaggattgcttgagcccaggagttagaggctgccgtgaactaggatcgtgcctctgcactccagcctggatcacagagccagagcctgtctctaaagaaattaaaaataaaaatagaatttcgtaggactgaagccagccatcccttcttacctagctctggacatgttgaacatctgtgactctattttcctatctgtaaaatgggaattaacagcattcccctctcagaattatggttgaagtctaaaagtaaatgtgaaagcatcttgcctgcagtagagtaaatgctccataaactcaagtgaacggatttgtcttgagtacctactatgtgaaaggccctcgagtgaatgctgggaggctgcaagagtaattccttcccaaccctgagttgacagctggcatgtttctgacatgactggccagagctagaggcctccctgttgggaggatggtttttccgtgcaaggctaatattgcttatttctcatctctcccgtcacactgctcaggtcagggagggactcccattggtcaaattctcttcaggccccttcccttcctggcaccaggataactaccatacaaagtgctgaaactcggccaggcacagtggctcactcctgtaatcccactttgggagaccaaggtggatctctgaagcacaggagttcgagaccagcctgggtaacatggcaaaccccatctctacaaaaaaaaaaaacagaaaaattagctgggtgtggtagcgctcacctgtagtcccaggtacacagaaggctgaggtgggaggatcacttgagccgaggtgggaggatcacttgagcccaggaggtcgaggctgcagtgagctgagatcatgccactgtgctccaacctgggcagcagagagagaccctgtctcaaaacaaacaaacaaaaaaaacaaaaacaaaaactgaaaccccactttactgtgtgtctagacagccataatcctaccaacagggtttgttactaggtgaaaaaaatcctcttttgttgcaaaaatctagtgaaactagagaagtcgaaaagtaaagcaatgctctggaataaactcgcccaaattagtgatttctcaagctttttgccactgggaccaggcctattacgccctctccgtgggttcccaagagagccacagcctagaagggaagctgttcagtcggttctcacccacgtgggactggaaatttcagacacggttatccgggaagacagcctgggccacagacctcctcgatgaccacacaccgagagccacttccccaaaggtaaccccaagcagatggcaaggcctcccacatgctctgtggtttggaaggaagcttcctctggcctcctccctcattaaggagaagggacgagctgcaggtgcggctccttcccagctggctcagggaatagagcccctttaaggccaggcagccttagcaataaaaagaatgaagggggcacccttgcaaggcagtcccccatgcagtccccaagccctctgcttttatttatttatttatttatttatttatttatttatttatttattttagagggagtctcagtctttcacccagactggagtacctctgcttttatgaagccgctaatccagtgccaggatctaaagcaagcagctggcttctaccaagttcctgccatctcatttcatcctctccatgccttccattttgtaggtgaggggaaggagagccttagagaaggaaagtgacattttaaagctcacacagctagaaagcaactcatgcatccatgtctttctgatgccagaacccagccccttgccactgtaccatactgcctcttgccaaggccacctgggctagccatttccaaacccagccttcctgctgccctggaggctgggttcctgccagaaattgagctaagccctgggggaggacatgggagttctgaaaagttaagcagcctgcctcccctggaagtgtcaccggaagatgaaagaactcttgtcacctgacccaaggaagccagtcccatggcccaggtggtcaacaggaatgacccgcaactggttggctcgggcagcctgccccagctgagtaaatggctccactggcacccagctgctcaggccaaaaccctggggagcatcttgaattccacacattcctgcacccccacatcctatccaccagcaagtcctgccaacgtgtgttcctgtaccaaatgttcactgggatcttgctatgaatcaggtgctgctttccctcctggggtctatcccctacccacaccctcaccaccatcacagctgtgtctccttccagccccttccacaatagggatcgttggagttttcctttccttgactagggctacttcccagtagacagcagtctccgcagggacaggggcatctctgttttgttcactctcacgttcctggctcccacagtggtgctggcactccataaattcatactggacaaatgaccagtgatcctgcccacgtctatccttggccctaacgtgaaccttcccttgtttgccctaggatctcacagatccactctcccctttggagctcctctgtccagaggtcctggagacaggga

SEQ ID NO: 95245 - DNA, 47130 bp, Homo sapiens
cagcccagagccgccctctagagagaaggtccggagtcccctttgaacaccaagggtcaccccttatgacctcttgccatcaacctgggctgagatttcctctaagaaacccccataccacagcatgggggagaattcccatccccagattagggccccaagccaggtccgcaaccaagggaaggagaggtgcccccagagttaaactcaagtgtccccaaaggctttcagccctttcccccaactcctcagtcccacaggtggccagataaaaagcatggattttggcaccagccagatccaagtccaaatgtcagtctcatcattctctggctgtatgattatgtgacttaacctgtctgagccacagcttcagagggaggctgtggcatttagtgatgatatatctggcacataaaagatgctcaataaatgctaacaatgatcagggctgccaaagacagttaagcaagctgtgcacagcaaaagcacaccacactttggaagacatccacaccacagaccttgtaggtgtgtatatttgttgtacaagtttctggcagatgacacgaaaatctcttgttctaacaaagttgctataatatgacaattttctcatagatgaaagaaagagtgggagaagtttttttttgttttttgtttttgttttttaatgtacaaaattcctggtagccctggctgttattcaacctcatttccaaccctgaatctttttctcctctgctttcataggccctaactcttgagcaaactccagtcctagagccctttctaggctgtggctatggccaacccattccccagggcctgtctcattctggcaaggaaggggtgccagaagcacagcacttacagccagacagcctccctcttgccttttctcttttgcaggttaacatggtggtcttaggcaagtacctgggcatccccaagccctacgggcccatcatcaatggccgctgctgcctggaggagaaggtgcagtccctgctggagcctctgggcctgcactgcatcttcattgatgactacttgtcctaccacgagctgcagggggagatccactgtggcaccaacgtgcgcaggaagccctttcccttcaaatggtggaacatggtgccctgagcctgcccccacccgccatcctctctgccctcttgctagggaaccctgccagggtgaaggcaaggaacaaccacctggcctccattctcttgggggagtcttggcactttgcaaacatcctggccaccatgggcaccaggacacagggatggataccacctaccctcgcctctggaatggcctacccaacccgagaagaatgcacctcattcttccctggcctctttcccacccacagcccccagaggctctagatcaacaatgttagcatgttccagaatggctgtgggaggcctagggagatgggccccacttagaattgctcccccttcattctgatgcctccctggggaacaaggataatgactttgcatctgcacctggaacggggcctgggggacctggggtctggtgtgccaggcaccaggctgcctctgctcttggaaaactaggaaaggggatcagaaacatcctctccccgctctaggtttcttctcccaaaggggacccaaggctgtgacacttacctccacccccatccagcacccttcagctgtgtgtggacaaacaaggacagaaaaacccagtgtccaagggccaatttaaatagaaaaaaagacaacaaaattttaatagctgactccgacctcagaagagtgattgctacctttctggaaagactttaattaccagagctggcttctcccagctcagaaatgctgagaagccaacgtgaggcctgaggacacacaaaggatgacggggcaggaggggatgaggtcagggtagcagagtgtgtgacgacggatttgggggcctagaggtgtccgtggttcctgggctgggattttggactctggatttgaagggagctggagcttccagatgtagcaggggtagggggccagatgttagaagagggtgtgtgtgttgggaggaaattaggttatctctgaaggtggagtttaatttcctttaatagtctttaattattccccttcattctgcaggcagtgggaggggaaggcttgcccggtctctctcagcaacccagggaccctgcacatagcttaggtttcatccctgaataaaccgctgtgcaggcccatgtcccctcccacagtagggaagacagctgccacgggaggttaatagcccggagtgaggtcactgagacatgcacaggcaggctggttcagctgggctgcagggcacgggcaggaggaagccagcctaccctcttcccccactgccagtgaggccattgtagggcagttggccctagggcttcggtccatctaggttttcagtggcccctgctgagacctcacactgagccaactactgtcactgttttaaccaacaaaagctagcctggaactgctatggttaaagtgggtgagcgggaacctgaaaatccccttctggaaggttctacagaactctatttgcaagctcctgctttaacctgagcgtcctctgctcaggatcataccccagcctgcactgagtcaagaaggagaaggaggctctgaaggggccgggggtgtgagctggggttgggactcccctgagaaagagctgtgggtaggaagggagtgagcattgcagagatagggctgggggtcggggccacactgagtgtgggaagctctggagttgctgctgggccatcgaggggccctggtgttggctctgagaatgttctgggtgaccagtcacctactttctgatcaataaaaatgtcgacatgcatttcttacagggctgtctacccagcctgtttgttgggttggggaggaggggaggaaagcggagaagactgcttccagttccatccactatgaagctgcttggctcaatttctgctgccacaggcggcccctgctcagctaggagagcctcacagtgccacggccagtgccacggccagtgccaggcaggctgattcagcaggatggctggcacattgcctcttgctctggggctgatggccctgctaagatggagatcagatcaggggagggatgggtcctgcctcttcatctcttctctcttccttcagcatcccctccatctctcagggacaacaggtcggggaggcagcccgggccctattaacagaggtgagagttccccagcagggctggttcccagggccacaggccactacagttccctttctggttttcgttttgttttgttttcttttcttttgtttgagaccgagtcttgctctgtcacccaagctggagtgcagtggtgctatcacagctcattatagccttgaattcttgtgctcaagcgatcctcccacctcagcctcctgagtagctaggaatacaggcacaggccaccatgcccagctaattgctaatttattttttacggagctggggttttgctatgttacccaggctggtctcaaactcctgggctcaagcgatcctcccatcttggcctcccaaagtgctgggattacaggtgtgagctactgtgcctggcccaattcccttccatttttgtgtctgaagcttctaagttacctggcttcagtggtctgattttggatgcctgaaatcatcaccctctcatcctacacatttgctgctgcctcaaattacaccgtttgatactcactcactttattttagcttttgttgtggagtaagagggcaaaaagttgctgcctattagtcattgacactttagtctgaattaaccacaaacctgtttctaaaagttggtattaacagaggagaagtgaaggcatgagtctccttccaaagacatatacagttctccgagaaagaggcaggtagtgggccagcaccccagggaaagcccctactttctgcatctattccccatctgtgctcacaagaaggctagggagactaaggcttcctcctgagctcgaactcttacccagggctcccaaggctgactcagccatcaagccattccacagctgaaaaaagtgaagctgtcccttgacccagaagcccagcagttctccttgaaaagaacatctttcccaaaaactgagacatgggaatgacaatctcagggtcctgttgaggcccttgaactggtgcagatgtcccagctggagatgctggggagcgggtcctggtccccatcctgtctcaggctgtcagcactgccagggagaagggaggaaacctctattcagcacctcctgagcctccgccaggcagggtgcgtcttcactattatctccgccagggccagtgattagctgcattttctacagatgaggaaaccgagtctccaagaggggggacactgacacccaaggccctatagtgggtgcacggtggagcctgcctctgaacccaagacttctctccccagagcccttgctcctgctcttccaggagcctgaatgcccctctgacttcggtttcccacctgacgactgagctttcctactctgacatgccaagctccccctggctggagagagttctcaccctcatcatttaccgctttcagaggtttttgggacctaataacagcaacaatagtaatacaataacgccaagctccataccagagctctaccaacgctggcccctgaggcctcacagcaaccatttttcagacgagaaaagtgaggcacgaacaattaagaaagttgcccggccgggcatggtggctcacgcctgtaatcccagtactttgggaggccaagtcgggtggatcaagaggtcaggagatcgagaccatcctgactaacacggtgaaaccccgcctctattaaaaatacaaaaaattagccgggagccgtggcaggcgcctgtagtcccagctactcgggaggctgaggcaggagaatggcgtgaacccgggaagtggagcttgcagtgagccgagatcacgccactgcactctagcctgggtgacagagcgaaactctgtctcaaaaaaaaaaaaaaaaagaaacttgcccaaggtcgcccatccaggaagcagctgaggcagggctgaaacccaggtctggctctaaaatccattaaaaaaaaaaagttggtgtttctcaaagggcaccaaaatgctttgggggtgcttattaaaaaatccagagggccgggtgctgtggctcatgcctgtaatcccagcactttgggaggccgaggtaggtggatcacctgaggtctggagttcaagaccagcctgaccaacatggaaaaaccccgtctctactaaaaatacaaaattagccggaagtggtggcacacgcctataatcccagctactcgggaggctgaggcaggagaattgcttgaacctgggaggcgaaggttgcggtgagccgagatcgcaccattgcattccagcctgggcaacaagagtgaaactccgtctcaaaaaaaaaaaaaaaaaatccagaggccaggctgcacccctaacctgctggatcagagtggacaacagacctgggaatccgcattttcaccagcttccccagcagagtaagaaagctccccattatagtctctgaaaatgcagaaaatggaggtgaggaagcaagaagcgtccgagatcaatatcatatatctctgcaccccctcaacagcacctgcccccaacagttcctggtgcctagccaggtacctgtggggacttgcttcccaagaaattaacttcctgggtgccggggtcgggacaacaggttcgtatacaaatactgggtcccttccagccaatcctgagctctcagctctgggaaggggctgggctttcatgactggagccaatgaattggcaccctgggctggaggggtggggccaggggcttttaaacctcatcctaaggggcctcaggggcagtgttgrggttggcggccacagctaagtccaacaccagcatgtcgctgcagmgaatcgtgcgtgtgtccctggagcatcccaccagcgcggtgtgtgtggctggcgtggagaccctcgtggacatttatgggtaagagtcagaggcctagtggtttgcaggcccttggtgctgatgcccttggaccttcctccctgcaggctgggcagggcttcttcagggcccactccccagccttggcctcggaacagcagccaatcagggaagcttgggtcctcctcttgctctactgagtttcctgaagaccttagccagggaatttgaagtttgggaggctgagccaggtagaagaggcttcagtgactgagctccagaccgggggcttggagggggctggtgccgcgaagagatggcacttttctatgtccaagggatgctgcaggttgggctgaggatctgtctggggcacacaagaataggaacaggcagatatccccagccccatcctgagcctatgagcctagaaacagagcatgaatcatttttaaaaaataagttaatacatagcacttaccatgtgccaggcactattctaagagcttcacaagtctcttgagttaagttttgaactttaatcttgaatttaacccttacaacaaccctgtgagctaggcttattattagcatcatctcatcagacaaatgagaaaaccgaggcagagagggcaagccattygctcaagtcacacagttactaagtggcaaagccagggtttaaacccgcttgtggtcttactcaggagtcttatggttttagctgctctgatacttggaaaataaagatttccaacctggtttcctctagacactcaatgcccatgcattatgctcctactgtgtgccaggycatgcctttgaggcccatggtagagggaggtaaggccttatcttctctctcttaggaagaaaagagggttagggtakggttttaagagctgggctctggggaccaccagggagctggcttcttaggcttttggggagamtccagggtcctggcttggaggtaatcaggatactgggaggggagggtgcagaactgtgggacagctcycacctctcaagtctcccagccctctcctcaggccaggtttctcaacctcagcactgctgtcacgatacctctttgtcatgggggccaccctgtgcactgtaggatggagagcagcattctgggcctctctttgctagataccagcagcacactcccgagttgtgacaaccaaaaatgtccccagacattgccaaatgtgccctggggtgggaagaaaatagcccacccattgagaacgagtctccaagactaagactcgaaaaatcagggcgaacttagtcgggagcagcgatggggttgatccagggcattggatgagagggggtgaggagctggtcatgggagggaaccaagtcgggagcagagccagcccaggaaataaatcctggtattggtgggtgggcagtaggaggaggaaggggattcagtggttcttgaaggaaggggcagccacggaggctgtgccaaggaggtaatgaggaaggaggggtatctgccacttggcaccactgcctgcctgccatggggtgactgggctgcgtgccatggggtgactcacctgcccctgctgcctcgtgcccgttgggcagatgtgtctccggtttgacctgycccaggaagcctgggcctggctcctcccccgcagagcttccttagaggatagaggatggattggggcaataagagrtaaaggccatagcttcctggagtcacctgagccacactggaggtttgcagagaaggccatcggtgggacagccacagggtgggggatggaagctctgataccttcaaatgagggattcttgggccctggtggccaaaccccccaggggtgggagtggagagctcctagttcgttcattcacatattcttcaagtatttcttttgggtctagtgtgtgtaccattcagagccttgaaggatgagcacaggctctggggacacatacaggggagaacaagcagctcctcctctctgagaagccagcagaggctggacaaccttcttacaagggtgccacagaaaggactcctttctgggaaggggagcaggactgagttagttctgaggtccctcccggcttggaggtgccatgatgtaacaatcctgggtcctcagcctgcgggccaacaagagaaagggcagtaggtgttgtggctcagtcctggctctgcaacttcccagctctctgaccgtgggaaactcctttaacttctctgagtctctgtttcctcacctgttgcctggggatgataataatatcagcaatggcactgaatgccactccccagcagtgcctgtaagcgctttccatatgttaactaatyctcacaaaattctcaagtgggcactgtcatcatcgtcattttatagataagaaaacaaaggcmcagagaggttaaacaacttgtccaaggtcacatggccagtgagtggcagagccaggatgtaacccagtttggccttacttcaaagggcagttaggggcattgaatgagattgtgtgtgcaaagcatgtaactaatactgatttgtggtgaacattcagttatgttaactgtcaccattatcatcatcatcagtttaaggctttgtcctgggcctgtggacagcctcaagcatccccaaacctgccatatgcaggatgtctgggraacagtctctggaccgtattgggagaaggagttgagaaaagagaaatttacatytgactcatggctgagtcagggcagtcttcctggaggaggggcaccaatcagacccttgaaggatgaggacaagcaagtctgttgggcctctctatctgtggcagtggattcaactttatcttcttgcctttccatgaattggagatgacccaggcatggtatgggggcttttctttcttgagcagtgagtcttaggatggggaaagggaaggaagggtaccctggtgcactgagccatgcactgggcgtctggtggctgattaactcctccctgcaactggaggcaggctcagcgggatggtggtctgacaagtgctatcccacagggctrtagggcttgaacccagatcccatcaagttccacagcccaggtggtttgcttggttccacacagctctttctcaaggctcaggcatcagcacaaaccttagcacaaagtcttggtgcaggaagaaagctgctttcttttcttcttcttttttttttttttttgttgaagacagggtctcactctgttgcccaggctggaatacagtggtgcaatcttggcttactgcagcctggacctccccaggatcaagctatcctcccgcctcagcctcccgagtagctgggactacaggcgtgcaccaccatccccgactaagttttgcatgttttgtagagatggggttttgccatgttgcccgggctggtcttgaactcctgggctcaagtgatctgcctgcctgagcctcccaaagtgttgggattacaggtgagagccaccgtgtctsgcccagtttcattcttaatgggcaaaatcaaaatcccaggatgacctctggtggggagggccatcctcagggcctctgtcattggcccagtggtaagaacagactggacccattcccactgggctttcccataacatgtggagatgcttcctggagtctgttgggttgtggctgctcatgtggctgaggggcccgygaagctggtcacctttgggattcatcacagrtgggcttggagagcagtccccaggctggttcagtgagacatctctggggtctyacacgccacttcattttttagttggggaaactgaggcctggagtgtgaaatgacttgctcagggttacatagtgagttagggacagagctaaaactagaaactaggtcttccaattcaaacgaaggatctctgactattggtgaagaagaaactgagtcacagaggtgctgagactcgcctggattggaggtcctggtggggcttgtggcgcctctgtgctggcagacttggctctaagggccccagagctccaggtgttctcagatgcayggctgtgtaagccctgcagtcagaaggtcctggaagrgtcaggtcccatctgcatggctgcagaggggcccagcgcacacagcagcctagagggcagctgagtctgttctctaagacacctcgaagagggggcaaccttgacctgagcgggtgcacagctctcgcacctcagaatgacctcaagtaacagcacatggaaaagacagaaggcagggagcccatcactaaggtatcccgggcaggtgtctcctaagagaccacacctggcaatgagccatgaagctcctcttttctccagctcagaggttctcaaccctggmagtgtgtttcaatcacctggggatccataaaaaaattgatgcccaggccccaccttgggaaacctgattcaactcatctgtgaarggccccagcaccctaggttttcaggatccgctggggatgaatgtgcagctggggctaagaaccgctgccctcactgggaagacaaacaactcatgtcacccctttctctgcagaggctgcctaatggagccaggactccaagttttggtcctagttctgtggtcactcactatgtcatcttgagcaactttctactcaaccctgggcctcagtttccccatatggaccctgaaggggttggcatagaacagtgggtttcaatttccactcatggaggcctctgagtcccctccctgatttgacaaagcagcttccattctgtcaacatcggattttgtttgatgcgagagctctgacctgcctgtgcagagagctgggcccttggggggattggtgcatttctgctcttttaaataygggggatttggaaaaagggtatacggggctgccactttccagtggtggggtggggcagggccacccagattacagtgggaccrtgatttcctgaacctgattctattgatgaggctggcagcgtcggcggatctgggatcctcgctgactggggaggggcrgctggaactgccacccagaaacccagctgcctgggtcttggtctcctctgcccccacatcccagctcggtggagacctcgttggtcatcttgtcaacctttcggtgttcagccatggggaactttcccawcagtttctcagctcctaaaatgtctgattttgttctcccagaagtccaggccctgagtccatgaagggagaagatgggtttgggtttgcaggcgagtggggacagagctggccatgagtcctggctctgtcacttgctagctgtgtgactttgggcaaatcacctgccgtctccaaggctcagtattctcatctgtaaagtggggataatagcacacaagttatgtggctgtgggggataccttcctcaccaatgccccgtcttcctcctcaccattgaagggggtgatacacgagggggatgggctcacactgagtcaactctacacgggctggagggaccaggctccagcatttttttttttttttttgagatggagttttgctcttgttgcccaggctggagtgcaatggggctatcttggctcactgcaacctccgcctcccaggttcaagcaattccctgcctcagcctccctagtagccgggattacaggcatatgccaccacgcccggctagttttgtatttttagtggagacgtggtttctccatgttggtcaggctggtctcgaactcctgacctcaggtgatccaccctcctcggcctcccaaagtgctgggattataggcgtgagccactgcgcctggcccaccaggctccagcatttctaagacaacctactctaagccgtgattctcagatgtcagcaaatatcagaatggcttaaaatgcggttccaaggccccacctggagcacttctaagaatctgcattttcaataaggtgggtctgaggttggctacttttagggaggccaactgttcctgtttgtctgggaccttgcaggttttagcacagcaaattctgtatccaggaacagccttagtcccagcaaactgatgctgttggccaccctaccacattttacccccaactcaccatcttaggctggctgtgccagaggagcagttgagttctccggctggcttggggggtgtggggctgggagagccctggacaggcctgtgcatggaagcctcagcggcgagggtccaaggccctgagcccaggactggaccagaagcactgcctagaaagcccagaagccagcatgtgacagctcagccatgctggcagctcgaggtggcctggagaggaaggactttgtccaggtgaggctccaggtacttcccctgttctctaggaaatgggaagctagatcctccygtacctgatgcaggttctcctcccagcagctgcccctctcattctcctaacacacagctttcatgacaggcatgagcactggactggaagtcagcagccctaccttctagtcacttatcttctgggcctcagtttccccatcagtgaaatgagggcatgacttttgctcatcctgagtgctttacccacactggttcctttcatcttctcctcatccccaccagatagatgtcgatgctgcggctgagggaggcagtsactcgctcaaagtcacacacctaatgagtggtgggactgggatttgaacccagttgtctggccccagggaccacaggctcaagtaccttgccacggctccatcatgttgcccctcctgatcaagaaccagcgctggctccccattacatagggatgaaatgaaaacaagctcattatagcctgagtctaaactagacctcttaaggttccacggtgaaaacaccttcccctcacttgtgtctcctcttggtgccttccctggggaacctgccccagccacccagcccactgtctcatcctgcctccagacccgtttcctgcaccctcatttactttaataactccttccctgtcctgggccaatggtgttgcaagcctttcctgtctattatcacacttgagtttcatgattgcccatgaggttggccaagtaggtgtcattatcccactttaaggtgaggttaatgggcccagagagactaagtgatttagtcaagctcagctggccgatgtgtgacccagcctggtctaaaacctaattcttgactctggtcccagcaccaccygagccctcggcttgcrgcccctcccttccccaacctcagatgtagcttgttyacctgtgctaagcccttgttcagaccgtggtcctggggaccctcctgggcaggggtgcttcagtcttcactggggatcccccagcatctcacacagagcctggcacatggagaggcaggggcgctgggctgaaacaccctacacccaggggctggagcctgggractgagtggggttttcataccagaaggaccatcaagggcgctcagcccttgcccatggacactggaggcccaaggaacagctttggggttgagggagttccataaaaagtgtacaggcttcagccaggcgcggtggctcrcgcctgtaatcccagctgggaggctgaggcaggcggatcacttgaggtcaggagttcaagaccagtctggccaatatggtgaaaccctgtttctactgaaaatacaaaaattagccggacacggtggtgggctgtgttgtcccagctgcttgggaggctgaggcatgagaattgcttgaacccgggaggtggaggttgcagtgagccaagattgcaccactgcactccagcctgggcgacagagcaagactctgtctcaaaaaaaaaaaaaaaaaaaaaaaaaaaaggcttccttgggagatggaaggcgrgtgcctcaggagcgtggctgagggtgttcccgagggtatgagaggctgctcttcctacctgggtttgtcttcctgtgtctctttccgactccctgtctctgactctccatctcgctgggtctctccaagtctctctgtccctatctctctgtctctgtgtcttcatgcctctctccctggttctgccatttcccctgtggggggctgcccagggccaaacaggccagagggctccaccagccctggaaattacaggctttgggagtagggttgccagataaaataaaagatgcctagttaaaattgaatttcaggtaaataattaataatttttttagtataagtgtatcccaaatacttcacgggagtaccaaacaatgattgactgttcacttgaaattcaagtccaactgagctttctgtatttttatttgctaagtctggcagccctgcttaggaggagaaacaggtgtgtctgtccctcccaactggtgaggacacctgacaggggcccagacaccagagtgggacctgcctgatggagagaagcttgggcttggtttatttcccttttcataaaaaagctgctttgagatgtaagagaatcatgttggtggaagagtgaagaggttgttttgggggaggtctgccttactctgagggaagatgggaagcggggggagtggccagctgtggaaatttggggtagtcccctacgtatcctgtgcctcagtttccccatgtgtaaacaggagtaattatctcatcctggggctgcagtgaggatcagatgagctaatgtacaaaaaggcttaggcaggcctgccgtgataagagtgcagaggctgggggctttttatgttatggtattgttgttattattactcctggggaggtggtgggcaagagtgtggactgaggagccacatggctgggtttggatcccagcccggccacagaccttgggcaagttacttaacctcggctttctcatctgtataatgggagacaataatagatagtgcctcccttctagggttattgagaggattgcatgatgggctggcacacagcatgagctcagtaagtgtcagtcactgttatcccccaggggcatgcatgccgctgcctccaggaggccctccaactcgcagtggcctctccctacatgggttcccactgagctgtgatcctgtggccttgagccccatctggctgccctggacaatgttggtcctcagctccccagcgggatcaacagtggggagagcagtgggtggatctgcccgccaggcagtacctgagtgcacagtgggcaccccacagtcaaaggatgcatagtctggtttccaaggaggaaccccaggctaggtggaatgagggaaatgcaatctcagggccagataacatcacagatactttaaacctgcaattaatttctggttgtttgaccaaatccggccaagtttcccgggtgacactgcagagctgtggaacagcatgggcttggagtcagacctgttgcacatctggctctgccatgtgatgcaacctcaggcttgtcacgaggcctccttgagcctcagttgctaatatgccaaatggggatgatattgctcaccttacagcttgtaagagtggagggagctgcgtgcgccaggtgcctggcatgcagcgggcactcaaccagattgaattcccttcccagggaagaattcaaggatatcttcccacccactaaggagacatgtgatgggatctggggtgagaattgctctttttaaagctctcagaactgtaaggggctccacccaccaatggctggtgttcactgagctcttcgtgcccagacctgcactggggatttatcgagcacatggctggcttctgacttccgaagagctcgccattctggtgagtggtaaagaaactcacaagggaaatgttaatgaacacaggggcttagaacatcagactgtgtgtatgtttttttgttttgttttgaaacagggtcttgctctgtcgcccaggctggagtgcagtggtgcaatcttggctcactgcaacctctgcctcctgggttcaagcgattctcctgcctcagcctccccagtagctgggattacaggcatatgctaccacgcctggctattttcttgtatttttagtagagacagggtttcaccatgttggccaggctcgacctcaagtgatccgcccgcctcggcttcccaaagtgcctgacctcaagtgatccmtccgcctcggcttcccaaagtgctgggattaaaggagtgagtcaccacgcccggccgactgtgtatatgtttgtgtggggtccaggcttgactcgcaggagcttactgtgaggatctgaggggactgggtggccaaggaaagcttcctggaggaagcagggcttgagccaaarctcaaacatctgagcaaaatatatctccttcggcaccgaccatggctctctgccctgcccaggtcagtgcctgagggcacagaaatgtttgaggtctatgggacgcctggcgtggacatctacrtctctcccaacatggagaggggccgggagcgtgcagacaccaggcggtggcgctttgacgcgactttggagatcatcgtggtcatgaactcccccagcaatgacctcaacgacagccatgtgagctggtccctggtggggtggggagaggtttcgagggaggcagctgtctagctctaggagggcccaacattctctttctccagagcgcagggcaacacagtgggtaagtgcctggccttggagccatactgctgattttgaatcccagctctgcaagttacagacacataccatgtgtccttggaaagccttatcatccccttggggcctctgtctgccatctgtaaaatgggataatcataacccctgyctcctatcattgctgtggagtgccataggagccagtgttgctccttctcttgcttcccaagaccccctggagaaggagttgtcccagttctgctgagttgggtctcagtttccccacatgtaggctgagggttgactaggggatctytgccactttgaatgaaagagagaaagcagggacaggggagggacaccggtgcctgggaagacccccttcctaggtgacagcatttccccaaggcgctttgctgtccgtaatccactctcttcctgaccctatttgcagggtaggggacatttaacacatgggagaaatgggtggcctttaagcttggcacaggtgatgtttgcttcgagggctgatagggaccaggacttggagtgtgggagtagtgggatccactccatgtcaggagcgatgtttcagaaactggccctttaaggagcactgaccacgtgccaggtactgggcagccatgacctcatccagccctcacagcagcccagagaggtgggggactgatgcccatttcgcagatggggcaactgaggttcagagtaactgtcccgggaccgcacactaatggtcaggagagctagaattcagtgcagacccctgggggcagtctccctccatcacccccacctctgttcccagccatgcatccatgaggcacttggggcaggacccaatgaacccatttaataggcaagaaaactaagaaggagaaggggtggctttcctgaagtcacatgatctagcgagcggcagagctggtgagagtcaggacagagtcccaggggtagtgcaagaggactggccagcctgtgaggggccccaccttggtgccggttgaagtggcgatggtgtgggtacccccaccttgaattccttggccatgatggctggtgggatggaggaagttcagagtctctcccactctttccctcacccgccatatacccctgctccctatcctgcctttggccaggatcccagtaattgtatgtttgaggcaagcatcactgctggtgattgacacatggaggtcagtaattgcaggatttaggggctcccaggactacagaggtgagtggcccctgcaagatcctcccctctggctgagattcggacatgagaagcagagagttgagacacccatgtcaggagggaataccccaaggggagggtcatgctttaaagggaacttggatgccttggattcatctgcctccaactaaatatcatccacgccatcttcatcctcaccctgtaacagttcttgagtgctcgctgtgggccgggcaccgagctgcatgtgccccatacatgactcctttcatcttcacagcctctaattagtcctaaggggtaggaactattattatccccactttacagttgaggaaattgaggcccagagaagatcagtaacttttcctgggatattcaaaagtgggggattcagaatctgggcccaggccatctgacctcagagccctgcatttaaccagcccccaccccacaagatgccacctgcccactgataacagtagctagtatttcttgggcacttcctatgggctcagtcttttacatgtattgtttccaagctgcattacaagcctctgaggtagagacctatagaggtagagrccttttcccattttgcagaggagaaaactgaggtggctcaggtaggtgagaggccttggccaaggtcatagagtacccagaggtgccgggctcaagcccgggcctgtctgagtcccacagacaagaatgttggcttggagagtgtccccaaaccctgcccagcccaaaccctttattttacaaatggcaaaactgagacccaaaggggagcaagagcttgtcaaaaatcacagagtaggttattggagggactgggacccaagtctcttgagaagctctcacaaatagctcccattttacagatatgccaaccaagacacagaaaaataaatggcacagaggaggttaaagaaagagcaaggttccttgggccccctcccctccttaccagatccccgagagctatcttttggggcgggagctcttggcttctgctggtattactctgcrcccaactctccacaggttcagatttcctaccactccagccatgagcctctgcccctggcctatgcggtgctctacctcacctgtgttggtaagttgggggccatgttgatggtgtggccaagggcacatttgaaaaattcaagcagtacaaaagagtatacgttgaaaattaaacctccttccctccaactcaagacttctagttccccaaacccagcatttttctagagatacgctgtgcttatatatgaaagcacatacatacctgtatatcccccctcttttgtaagcaaattgaagcatactatagacatggaactggaccttgcttttgccagcttaaagtttttctgctaagcctccacaaatggatacataaactccgtgcaagatggctcagatgttggagctatcagacagggcatgcaaagtaatmgtgattaatatgttaagggttctagtggaaaaggtagacaatatgtatgaacagatggggaatttcaacagagaagaaaatcaataagaaagagtcaaatggaaatgctagacataaaaaccatagtaataagagattttaaaartgcttttgaaggtttcaccagtagacttgacacagctgagkaaagaatcagtgaacttgaagataagtgaataaaagttacccaaactgaaacccaaagagaaaaaagaataaaacaaacaaatgaaaaaacataacagatctaagagctctgtgacagtatcaaacagtctaaattcaatgaaattcctatagaaattccaacgtggcttttttktttgtttgtttgtttgttttaaggagttttgctcttgttgcccaggctggagtgcaatggcacaatctcagctcaccgcaacctccgcctcctgggttcaaacgattctcctacctcagcctcctgagtagctgcaattacagacacatgcctccacgcccagctacttttgtatttttagtagagacagggtttctccatgttggccaggctggtcttgaactcctgacctcagatgatctgcctgcctcggcatcccaaagtgctgggattacaggcatgagccactgtgcccagccccaacatggctttttaatataactttacagagctgatcctaaaatttgtatggaaaagcaaaggtcaagaatagctaagacaattttgatgaagaataaggttgagggattcacaattccaaatatcaagacttttttttcaagctatagtacttgaggcattgtgaaattggtatagagcaatagagcaaatagagaacccatagacagacccatgcttgtgtggttatcatgtggcaataaatgaacttggagccctacctcacaccatactcaaaaataaacttcaagtcagttaaaaatcttaaggtgaaaatcaaaattgtaaagcttttagaaaagaatatctttgtaccctcaaaatagtaaagattttctttaacaaggcaaaacaaaagtgcaaagaccataaggggaaagattgctaaattagactgtattaaaattaaaaatttatatgcaacagacaacaagtaaaaagtcaaactgtgaactaggagaagaaatctgcaatgcatacggctgacttggtgcatatagaatatgaagaactccaatcaataagaaaaggacaaaaataatagaaatgggcaaaaacatgaataaacaattcacagaagagaaagtcccagtgatcaaaacccaaattaaaagatgcctaaatgagcattgccaaggttgtggagctgggaaactccttacaaaggagtgggtgggagtttgctttggctcacacacttgagaagcaattagcaaagaagttgaaaatgctttatctgtaggaggcattttttagaagcagaacttctaggtyatagagaatctatattttttaacttgatagatattgccaaactgctctccaaaaacactgtatcagtatacatgtctgccaactgcatatatgctttgccaacactgcattagcaactttttccctttttgccaatcagttggcattgcactgtggttttactttgcctttctttagttaggagtgaggttgggcattccccatctgcagcccaaatacatacacacatgatcattggaaaataacatagacagaaaagtacataaagctttattttacatacatatgtgcataaagcatatgtacacacacacacacacacacacacacacacacgaataattacaaagcaaatcaaagaatagctcagaaaataaacccaagagtagcccaagaaatgaaacactaccagaaccccaaagtccccctcaatgtccgtctctgatcataactccctccttctcctacaggtaaccactatcttgtgataagtattttcttgcttctcctcatggttttatctcttgaacgcaatacccaaataacatggtctcrttttatcatctgattttctgtggatgcagtcatatcatgtatgttcttttgcgttgggcgtcttttgccctatgctatgtttgtgagatttatccacttgttgcatggtggttgagtatcttttcacatgtttaaaaatcatttcaggccacgcrtggtggctcatgcttgtaatcccagcactttgggaggctggggtgggtggatcacttgagcccagtagttcaagaccagcctaggcaacatggtgaaatcctgcctctatgaaagatacaaaaattagttgggcatggtggcatgcaccagtagtcccagcctcaggaggctgaagtgggaggattacttgagcccaggaggcagaggttgcagtgagccatgatcatgccactgcactccagcctgggcgacagagaccctgtcttgtctcaaaaaaaaaaaaaaaaatcctatctaatgtattctttcttctctccctccctgcccctcactgcttcttctttaagaactaagaagactgcttttttttcagagcagaaagattgattctgacctcctgaatgctccatttgcattatgaaatctcacccagtgtctagggctaaaygttaagaaggtgggatgggggtgggatttggggactgcgagtagctcagaaaggacacacagccaggaggcggcagaacctgggtttgtgttcacatctgtttgacaccaaagtccaggcttgctaccccattccaaggagatgaggcagctttatatagacaagaatgttcctggagacctgggctcagttcagggcatgcctgggactgcaagggctgcagggatgcagataggaagtggtcagggaagtctccctagagggggcagcatttgtcctgggcctttgctgtgaccctgcttcttgcctcaggcctctttccccagcccagagggtgcagatgccctcacctcttggatggtgtctccttagaaatgacttgcctttgctcagccccagacaagccctgagatcaaggcctgccctgggctcctgggaaccytgtagtgacttaccctctgcctcctcttgcagacatctctctggattgcgacctgaactgtgagggaaggcaggacaggaactttgtagacaaggtaagcatctctgcctgggcccaggaagcaggagtgcagttggagcttgctctaggttgggttaagaaggatgaggccattacagatatccccctgcctcccagctgaygccgaraccaagggccaaaaacagaaaccaggcatggctggggatcttctttcaccaggagaaaaatcatcgccaggaattatcaggcatggaggtacccagccctgagctaggccttggtttgtgggatcaagaccttctggactcayaaactaggtcaggagtgggcaaactttttccgtgaaaagtcacatagcaagtattttaggctttgtgggacatatggtctcaattctgccactatagtgtgaaagcagccacagttaatacagaaatggatggatgtgactgtgtgctaataaaactttatttatacaaacaggcagtaggccagatttggcccacagttcataatgtgctgatcctgacctaggcgagaagagaaaccaaatatgaaactgttgaagaacttgggactgaattatgttggaacttggtgccctgggagttaagaggagaaggtcgaggtgggctgggtgggtgaggaaggcttcctggagggacgtacccttgagctgagctctgaaggggtgcaggagggaggacgttccaggtgcagggaatggcaggagcaaaaccaaggagggtttaatggaggaatgagcacagagtgaggcgtgtggtcctataatcaggttgcctattgagaaagaggatgttggctgaaggcccatcacagatagccatgaaagacagctctgtgctttggactggatggtgtgggcaacagagagccattgccattgacatgtcttgagaaggaggtgcttcgagaacgtggacctagcctcacagggttgggtggttacaggccaggctsgggttcctgggtagggaggcacaggtctcatctgagccctcatcactggctatgttttgtcattggcagcggcagtgggtctgggggcccagtgggtatggcggcatcttgctggtgaactgtgaccgtgatgatccgagctgtgatgtccaggacaattgtgaccagcacrtgcactgcctgcaaggtgaggccggggcagcctgagtccctgggtgtccagggtcactgctcagttaccccatgggagttccaacccacaggcgagactctgaggccagagtccaggggagagcgccagcctccagacacacctcgatgctcctcaaaacccatctcaggctggcagctgcccctccctagtgtctctagggccagtgarcactcacatgccagggcagaagctctggaaatgagccacctcgccattctcttcctccaggggagcagaggatgctagcattatttgagcacctactgtgtgccaggccttttccccaaattctcattgaatcatccaagtgggacaatatcatcaccccaatttagagatgaggatgctgagactcagaagccaggagactccctgaagactgtgtctgatctggggcctcccctctcaaccccaaatctgggcctcctccttcagcacctctggcctacatttctgtgactcccccacctcttgctaagtccatctgtcctgaattccagccccatggagaatgagctgcaatattccagggtatgctaggtgctgtccacgggagatgcccacggttgccttctgaagtgggcaccattggacatggggatgctggggctccagaagggaggggcttgtccagggtcacagggagtgatgctgggatggaggccagaacccttacctgcacgacgcccacatggccttaccctccttgcttctctggagcacctgttgtgtgtcagacaccagctggctatgccacacttcatgtttctctggscaattgaggaaacatgagtccaggagagcatagatgtcttcatggtttgttcttgatggcttccagggttttcacaaagctagggctgggagacccaggtcttgatacccactgacctggggagggagcygggcagcagaggaaggggccaggggccaggactcccttgagtcactaccactctgtctggcttcacagacctggaagacatgtctgtcatggtcctgcggacgcagggccctgcagccctctttgatgaccacaaacttgtcctccatacctccagctatgatgccaaacgggcacaggtcttccacatctgcggtgagtttgtgccactgccccttgccatctgtgccctgttgccaggttgcctaccagggaacctcctgttcctgccttgggccatgggcaggtcctgcttacactccgggagatgccctggtgggtggcgggtcrcagtaagaacagtcagaagtgggggctttggaactgatgaactggtgcccccrgcacaacacctggcctgaggtcattttatttgatgaatgaccttttcaaatacattttaagcatgtgtagaaattcttatcaaaaatttcaaacatacacaaaaagcagtgctgtgaatccccatgtgcctgtcactcagattaaacaattatcactgttttgtctgtctcgctgaagttttgtaaaaccaaccccaaacaccatagatttcacccaattaattcagtttgtattccccccaaatatagatggctgttgttttacatagtctgccaaaatcacaagaaatacaagtaaaaatctaaatgcctttgagaaactaaaaatgtatacaagtaataagatgcttttttttttttttttttttttttgagacagagtctcgctctgttgctcaggctggagtacagtggcgtgacctcgggtcactgcaacctccacctcctgggttctggcgattctcctgcctcagcctcccaagtagctgtgactgcaggcatgtgccaccacacccagctaattttttgtatttttagtagagacagggtttcattgtcttagccaggatggtctcaatctcctgaccttgtgatctgcccgcctcggcctcccaaagtgctgggattataggcgtgagccaccgtrcctggccgcttattttttaaataatcagacaatatggaagtatagaaaatgaaacctgagagttctctacccgtctctaaatctgactttttttttttttttttgagtcaaggtcttgctctgttgcccgggctggagtgcagtggcatgatctcagctcactgcagcctccacctttcaggctcaagcaatccttccaccttagcctcacgagtagctgggactacaggcatgtaccaccacaccctgctaatttttttttttttgtaaagacagggtttcaccatgctgcccaggctggtcgtgaactcctgggctcaagcaatccacccgmtttggcctctcaaagtactaggattataggcgtgagacgccgcacctggcctgaatctgattgtcactgttaacgagttgggatgtgtgcttcccaactttattctacatgttctccagcgtgtgtccatatgctgctttccaaccggcttctttcattaagtaataatcccacacacctttyctggtatttattgagctctacttcattcttttccactgctgtataatattcctaagcatagaggtgctgtgacttacacagttctctgaacatcatagtggtttgcagtgttttgattttataacaatgcaggttgcttgaggtcaggggctttgttcaagtccakaaccgtgccccatgggtgcactgtagttgcacagtaaatatttgatgaattaatgaatatcgagcactcttgtacagaaatattatgtgactttgtacctattattgtttgtttgttgttgttgttttgttttttgttggttttggttttttttgagatggattctcgctccatgcccaggctggagtgcagtggtgtgatcttggctcactgcaacctccgcctcctgggttcaagcaatcctcctgcctaagcctcctgagtagctgggattataggtgtgcaccaccaccgcccggctaatttttgtatttttagtagagacagggtttcactatgttagccaggctggtcttgaactcctaacttcaggtgatccaccgccttcggtctcccaaagtgctgtgattacagacatgagccaccgtgcccagcctgtagatgtatttttgtaggaaagatacctagcagtggaattgctgggcttggggtaaacattactttgttggatgctgccaaattgtgctccaaaaaggtatgagcgccagtcttagaaaggaagaccctttcccccagccgtggcccccactgtgtattacctgtcctctcctttgccagtggaggtgaaaggagggagttgttggaggacttggaatttttggtgaggctgcagacctcttcctgtgtccctcatactcatgctccctgggcccacagggagtcacagccaccccgtccctccccttccaggtcctgaggatgtgtgtgaggcctataggcatgtgctgggccaarataaggtgtcctatgaggtaccccgcttgcatggggatgaggagcgcttcttcgtggaaggcctgtccttccctgatgccggcttcacaggactcatctccttccatgtcactctgctggacgactccaacgaggtagggacagagggggttcaagaggagctccactcgggaccagcctgggcaacatggtgaaaccccatctctacaaaaaaaaaaaaaaatagcgaggtatagtggtgtacacctatagtcccagttacttgggaggctgaggtgggaggatcacctgaaccccagggaggttgaggttgcartgagccatgatcaccccactgcactccacagcctgggcaacaaagtaagaccctgtctccaaaaaataataataataaagggcagtggggaggrctccattcctggtaagtctaccaggcaccactggtgtgaaagaccccagacttcttgaccacccctctggttcatttccatcttgcagagaagcaaggggttttcttatggaccacagtggtggaatcagagtccccccaggcctctggactccaagtccagtgctctttctcccctggtctgcccctgcaggatttctcggcatcccctatcttcactgacactgtggtgttccgagtggcaccctggatcatgacgcccagcactctgccacccctagaggtgtatgtgtgccggtgagtcttggggcagtgggtggtccctctggcccccaggccccggctccatcctgagcccctcttccctgggcttgtccgtagtgtgaggaacaacacgtrttttgtggatgcggtggcagagctggccaggaaggccggctgcaagctgaccatctgcccacaggccgagaaccgyaacgaccgctggatccaggtaaccacagccactgggcagggcccagcaaggacgccatcctggagrgagaggccttcatttgggggccaycgagaaacatccaggaggacctgggtgctccccagggaacttgctgccgtttctaatgtgagacctagaggcttctctccagaaccttctggagacccacgctgatcctggattcaacacccattcacccaccggatctgggctaggcactaggctaggcccacaggggtggcacaggtgtgagacacacactccctgccctcaacagctgagaccagtggttctcatcaagaggcgatgtgtccccaggagacgttttgcagtatctgcagacagtgcgcaggacaagcccccacaataacatatcatccagtcccacgcctcagtagtgtcgaggctgagaaaccttgatgtgcagaatgattgctacaaaaatacctactcctactatctagtgtgtagctggggcaacatggtgaaaccctgtctctgcaaaaaagttaaaaaattagcagggcatggtggcgtgtgtctgtagtcccagctactctggaggctgaggtcagaggatcacctgagtttaggaaggtcaaggctgcagagagctgtgattgtgccactgcactccagcctcagcaacaacaacaaaaaaaaaaaaaaaaaaaragagagagagagagagaaaaagaaatatctagggtgcagaggctataccagcaaagcaccagtagggtttgggggatgcagcatcacctctgcccagggaatcagtgaagacctccaggagggagagcatctgagctggaccagatttggcagatgagggcacatgacttctgccatttatgccccattttctgcaggccaggcatagcatcatttcatcttcttgataaccccctgtaagtcccccataattcaggagctcttaggggagcatgactgggccacagagctggtaaaggcagtgctaggactcaggctgccaagcaccaggctgtacaggttggtggtcctggcagagaccgagcatgcgcaaaggcccgggggtgggaggcaggagagagaaccttgtgtgttctcctctgtcagggcactggttctgagaaaggcaagggttgaggtcggagaccttgaattccaagttaaggagctttcctcttggccggaggtcagtccagtgagagggtttggggcaggactctggggcacgatgggctgggtttagagcctggctgtgccaccaactaactagctgtgagctttgggacaaatattttttaatttttatttatttttttaaattaatatattttgaatttatttttctttttggagacagtgtctctctgtcaccctggttggagtgccatggcatgatcacagctcactggcagcctggaactcctgggttcaagtgatccttctgcctcagtctcccgagtagctgagaccacaggtgcrgccaccaggctcagctaattttttgtagagatggggtcttgccatgttgcccagggttgtctcaaactcctggcctcaagcaatcctcccgcctcaccctcccaaagtgctgggattataggtgtgagccaccgtgcccggactggataaataattagacctcttagttcctcattttcctcatctgtcacatgggataattatggtgcccacgcccaggcatgtcatgaggatgaatggagttaatgtttataaagagtttagggcaggacctggatgtgaagttcattcacaytgggccatcttttcctccagaaccagaggggtcaggactgacctgggcacatttatggatccaactcaggccactgtgagkgcttctctgtgtccacctgccttggcccagtactcacagggacacccccaaggtcatgtccatgttctcgttcacctccggcctctgtcttgctgtgtgaccttagacaagtgcaccccctccttgagcctccagcccctcctccagtcagcaggcaccctgacctcggtcctgtccgcctccaagcacaaaacatgcttgggccaggggacttggtgagcagtctgccccacagggctcagagccgagccagcaggggcagctgttgactgtcacagctgtgcgtctctcgcctctcctcacttgcaggatgagatggagctgggctacgttcaggcgccgcacaagaccctcccggtggtctttgactcyccaaggaatggggaactgcaggatttcccttacaaaagaatcctggtgagtggtcccgrccgcagcccacccctgagagctgagaggccttaccccaggggccacaccggggtgtggggtacagagggcagcagtgggaaccgtgctctttagggatgagggtagggttgccagataaaatgcagggatgcccagtcaaatgtgaatttcagacaagcaacaggttaactttttggtgtaagtacgtcccaaatattgcatgggatatacttacactaaaaaagttgtcgtttatctaaaattcaaagttaattgggcatcctgtatttttatttactgaatctggcagccctaaataggggaggcaggatggtgcacctgttcagagcacaagctttagggtcagaccaaccctgttcygttacttacatgctgtgtgatgttgcgtgagttactaccgytctctgagcctcagtttcctcatcagtaaaaatgacattttggccctggcctcacaggggtttgtgaagcatctcatcmtcacagtacctgcatggagggagtgtgtgtgygcgcaccactattagctagtatcattattttaagaaaaaggataacagggaaggtgatgattgctaacgaggacctcttgagaaaacaagagtgacttgcctggtgccgtaaagaacaagagacccctccaaccccctcactgatcacacagatgctaggagctctctctcctgacccttgatgttgtcgaagttgcttctgagagatagccctggggaggtctccccttctctagagttcaaagacagaggcccacatcagcagcctcttggttcccacaattggccacttgagctgctacttgcccttgggctgaacttgcaggaaggctgtgtaggtaaggggrtggagtggccatggcctcaggctccatgtccgatggggagtgcaggagcaaccggagcgccccctgctgtcttgccgtgataaggcagcagggccagagagtccgagcacttcccgactttgcctgctatgcgtgcatgaaatattgactgggtcagatcccccacccaccgccaatgactctgtatttccacctgaagaatggatggcctttcccaccctgtcttgaaggagctcaaagcccagcaagttggttcaggcycttcctggtaccctccacccccgcctgacttggtttccctctccagggtccagattttggttacgtgactcgggaaccacgygacaggtctgtgagtggcctggactcctttgggaacctggaggtcagccctccagtggtggccaatgggaaagagtaccccctggggaggatcctcattggggrcaacctgcctgggtgagagagagacagggaatggagttcctggggtggaggctgagggttgrgggtggtgatgatggtggagcagrggccattgcactccttgaagagagccagaagcaaggaatgatgaaattatactcccggatgtgstggggttggtgggtgttcaccagacacagtccacacttacctcggggactctgaaaccagagagagcagagacctaagagatcattcagtccaacactttcattttacaagtgggcccagagagggtaagtgagtcacatagaaagcaaagttataactagactcaagttttctgattctgaaaataaatagatgatactagtaacagtcaattaatagtaacagaagaagagtgggcatggtggttcatgccgtaatcccagcactttgggaggccaaggcaggcggatcatgagatcaggagatcgagaccatcctggctaacatggtgaaactccgtctctactaaaaaaaaaaaaaaaattagccaggcgtggtggcaggcgcctgtagtcccagctactcaggaggctgaggcaggagaatggcatgaacccaggaggtggagcttgcagtgagctgagatcatgccactgcactccagcctgggcgacagagcgagactccgtctcaaaaaaaaaaaaaaaaaaaaaaagtaacaaagaaaaagtttccattcccaacagtcctgggagaaaatgcatttaggtcaaagcttgttcatactaccatgtaaatgactaatataagatcttttcctgagagcaagagaagtgaggtacaagacwtgctaagtgaaatgacaataacatacagagagagtaacaaatgatgtgttgttcagtagtgacacaggggtgctgatggaaaaggaatcctatcatattggttrcttgctgtggactagaccaagacattgagctaaccaaatgcaacaaagctgttagaacagacttgggatcaaataatgaatgaatccagagtcaagctttggaagggactactgccctcaaatacataatcccattgaaagaggaagctggaccatgcccttagatacattttcstaaaaattgaacatgggggwgaaatctgtctcttggagaataagaacctggtgtgagggtggttctgaagattttcctggatggtgggacctggtaggtcattgccctggtgtgactgacctgtcctgagtctgcctcatgcagaactcaccctaagtggaattttaaaatatacgtatctggctgggtgcagtggctcatccctgtaatcccagcactttgtgaggctgaggcgggcagwtcacttgaggtcaggagttcgagaccagcctggccaacatggtgaaaccccatctctagtaaaaatacagaaaaattagcctggcctggtggtgcacgcctgtaatcccagttgcttgggaggctgaggcaggagaatcccttgaacctgggaggcggaagttgcaatgaggcgagatcacgccactgcactccagcctgagtgacagagtgagattccatctcaaaaataaataaataaataaaatgaaatatacatatttattactttcctgtttataaaagtaatgcatgtttttttgttttttaaaaatcagatattgcaggaatgctaaactcttgtcattttatttctgcatggagtctttttagttaagcaactttttttttaacctcgtgggtcccaggtcaagtggccgcagggtcacccaggtggtgcgggacttcctccatgcccagaaggtgcagccccccgtggagctctttgtggactggttggccgtgggccatgtggatgagtttctgagctttgtccctgcccccgatgggaaggtaagaacttcgtgcatgacgtgtctttccctggcatctggggcaagaactgagctccagggcgccatgccaaggcaggaggctcagctgaatctgttctctgcaygcagggcttccggatgctcctggccagccctggggcctgcttcaagctcttccaggaaaagcagaagtgtggccaygggagggccctcctgttccagggggttgttggtgggtaacagtgccgtgtccctccttgcggcttgcctgccccttacccaaattaagacacatcrtggcttgagagggggarggcaagttttaaagcaggkgtgtgtccccaaattcagggcttctcactcctgcccctgcacaccttgcttcaccagacaccactgcccacagctggggccgagctgaggtgggaagcggggtgatagaaggtggacatggactgagcggggacatagtggcttcccaggcaggtgaccagtgcagtcacggcgtggagctttaatgttctgcagtcactatcctgaaatctcccttttttttttttcctttttgagacggagtttcactcttgttgcccaggctggagtgcaatggcgtgatctccactcaccgcaacctccgcctcccragttcaagcgattctcctgcctcagcctcctgagtagctgggattacaggcatgcgccaccacgccyggctaattttgtgtttttagtagagacgggggtttctccatgttggtcaggctggtctcgaactcctgacctcaggtgatcagcccgcctcggcctctcaaagtgctgggattacaggcgtgagccaccacacctggctgccctgaaatcttaattctgttttgtgaggtctgatggatcagtggagcatctacggggcttggagcctctgctcaggcacagtcctgtctcccagcctccctgcctccctggcacagattctctgctgcctacttctgtgctccctggagcctcagtgcaaggcctcccccatctctgtcactgtcctgagatgctgcagcactctgcccccagcaggagcctgggcatggggagggctggggttgggcacatgtgccactcagcatcttcatggcatcagtcgtccctgccctgcaagggcatttggtgggcaacttgggaggggtaagtgtctcacccaggcttgctcaggtacccagcacatacccagaggccacaatactctggaggtcgcccatttgccttggcttggggtggcagtcctgtgggaatgagagatgccaaactggacctgccagccccgttccagggcacagcatgtgggtctcatagcagaggcatgcccaagcacagccccctgggagctaggcctccgctgtgaggcccacagggtgggccctgacaccagcaagggactgtccagccccatgcaagtccccggcaaagcgcaatgtgaaatagcaaataaaaaccaccctgacaagtcaggagagagactcggggacaaagaaacaactttatactgtagcacttttaatggtactcttttstctgctctttaaacaaggagctggcattttcttttcttcttttttgagacagggtctaycagccaggctggagtgcagtgacatgatctcagctcactgcagcctcgacctcccagacttaagcgagtctcccaccgcagccttgcgagtagctaggaccacaggcatgcaccaccacgcctggctaattttttgtattttttgtagagatggagtctcaccrtgttgcccaggctggtcttgaactcctgagctcaagtgatctgtctgtcttggcctcccaaagtatgggattacaggtgtgaactactgtgtctggccagggcccacttttttttgttttgttttttgttttgcactggaagaattttgagagagagagagctggctggactggagtcatctggcaagcttgctggaagcgttctcaaattcactccctttccagccccactgagactgcatgaatcccagaggatcctccctttctcagtgaccccagaggtcccagggcaaagaccctttgacacgcaggatcatagattttcttggtcccatggcctcagggaaggcagatagcatcctagaccaaacacagctcagagagaaaaaaagctcctgtagaacttagacgcccccaagtataataatttccaaagtccccttgctctctgtttgctagcgttaacttcttccaacacaaccctggagccttagcaataaaatggaagagaaatagtctttcttgaccctgttgctcccaaacgcaccctaactagactccggtgaacctagagtaagtcttagaaatccttaaatccaaattatgtaccaggcagggagaartgccaccttcatctttcctgggagaacttatggtgagcaagacccaggaatgggttgagcagagttattccaacctgcccagctgggagggagcgtgggagaattcacagatggcaggccacaagcagccaccccaccctcgagggctgacactcaggcagtgactgtggcgattaattacatagacacagaggccagacacagaggccagagcactgattagacamctcagtgcgccaggcctmacgctgtgtgcatcacacgtgttatctcatttgatctcacgagagatcaaatgggatgactctcacccacctttattcccaagaatgtgaggctcagagaggggatgtcactggcccagaggcctcagcaagattgcagtggagctgggactggaccccagcttcctgccttaaactggggtgaagcgggcgttagacctgcagatgggtcaggggagccctctcctttcccttggtcaaggcttgaggccctgtgcgagccctgggcttgggtttgaatcacaagcccccacatatcctacctgtgtgacctttggcaagtcttctgacctctctgagcctcagttttctcatctgtaaagtggggatcataatgcataccttgtgggggtcaccgtgagggttaaatgagatgctgaacctgggcactcccctcggggcctgctcatggtaagcgcttactaagtagcagccatgaggattgtgtgccattgactctagcctccgcttccctgtccagtctcatctgcatgggcacaccatcaggctgagaaaatctggacccctgggaggtccccatttcacgcagtcaccccctgaagggcaggattggggctggatggtgtctgaatcccaggactggctggttcgctgctcagtgaacctataaaacctgactgatggtgggtgggtgggcagcaactgacccagctccccgctaagccaaagcaagaggattcctcatccagtgccctcgggcagttgtamatttccagtgamaggcgttaccacttccagtgaactcaaataaaggtctcagttcattccactgtggcaaccagaccctcccactccttataccccaagatgtgcacagtggccaaggcaagctcagacaggtggaacccacccaaggcctgggaaagtcagaggctgctgactcggcaagaccattagctgtgaacttggctcctgcctgtctgcttccctaagcaggtggtcctcacgttggtgctgtccctgtccttctctttcatctctctccttcacagatgatgagcaggtcaagaccatctccatcaaccaggtgctctccaataaagacctcatcaactacaataagtttgtgcaggtacaagggctgtggtgtacctgtgggctgtgatttgggagtaggcggggctggaggcaaggatgggatacagacatctgaggctaactgttcatgaaagctcaggttagaacaggcccagacagaggggtcccaacaccctcyyttgacccagaagaagtgaggggagcracaggatgccttggtgcccccaaaacacactggcaaggtgtccccaactctggccctcccctgcccccagagctgcatcgactggaaccgtgaggtgctgaagcgggagctgggcctggcagagtgtgacatcattgacatcccacagctcttcaagaccgagaggaaaaaagcaacgrccttcttccctgacttggtgagggcactacccatgactcctttgccaaatcaggctgcaaacctctaagctcgagagaggaaaaatgtctggtcacagtcatatttaggattgtggtggccagtgggggtggcagggagaatcaggggtcctatggtgctcctcagaagggcttctagctggctgaccaccatggtccctgtggaatgcttgctggccaagccctgscccaaggggcatcagggaaggggtccacttgacatttgtggagtgaatgaatgattgcatgaggtcacgtgtgcaaagcacatggcatcagctgggaacccagatgctcattctgctctcttcctcccagcttgtggctcttcatccatcccacrtgtatttagggtgtcctgtggcagatgcagagatgattaagaatgccccctgctctcaagggactttcagtctaatcggttgagagggaaactcttcccttctctgaggacatgtcccagtgatctattttgtaggataaggcgatgtggcagtttggaggtgagacaaagcacttccagcctaagaggtagaactggagatccaggaagtcttcatggaagaagtggcttttgactgagccttgagggctttgcctctgatgcttgtaaatctttttttctttttttcttttttttttttttgagacggagtctcactctgttgcccaggctggagggcagtggcacaatctcactcactgcaacctcagcctccagggttcaagcgattctcctgcctcagcctcctgagtagctgggattgtgggattgcaggcgtgcaccaccacgcccggctaatttctgtatttttagtagagatggagttttgccatgttggccaggctggtcttgagctcctgacctccggtgatccaccagcctcggcctcccaaagtgctgggattacaggcggaagccaccgtgcttggcctgcttctaaatcttgagcttgcctttgaaacacctggacaggtggggccccaccccagcggtcctgattcagcaggtctaaagcacggcccgaggcactgctgccgcgctaacaaacacccaggtggtgctgatgctgccttttagaggaacacagtttgagtagcactgctataggtcacccagctcccctctccactcctccccacctcatcccctaaaagaactcaatttgcccattgtcagagccttgtggggaacctgtccacaccaccattgcttcatgccccgctttttcsttcctcttttcaggcaacattttgccctccgcttgcaaagcctcttttcactccccttccttcctgttcgaggctatcttgtaattatatatgtgccccaagaagtttgtgcaatgattcaggttcttgtgttcrcaagagacagagtcctactgaagccagcttcagccagagggagtcttaatataaggacaccagaaacctgagggcaggatagctgcagcagagcctggaaccctctctgtttctgtgtctacatcattcattctctctctttctctcaccctctccacctcctacttcttctccctcttcttccagcttggcttcctttgcttctctgttcctggggacaaagatgagtatggccatgcacagagacactgacacgggcagagaccaactagacgctcccattgtcagtttcaaattcctgggagagggactctgattggtccatcttggaccagctgttctccctggcccaatcagttatggcctagaaggttgggattctgcagcacaaacatggcagctgccacaatccacaattccaaattcacattagggcagtttccagagcacgttgccagagtgagttctgcggatgctcccaaaggcacctggctaaccggttcttcccagcccctttagccagttaccttctcattgcacaggaaagggtgagtagctattgacaaggctgtctaaaacacaaacctaggtcctgcaggtagagtagaggtgtggkgtgggagcccagtgatgaagtgctgcttcccctttggactgcaggtgaacatgctggtgctggggaagcacctgggcatccccaagccctttgggcccatcatcaatggctgctgctgcctggaggagaaggtgcrgtccctgctggagcckctgggcctccactgcaccttcattgatgacttcactccataccacatgctgcatggggaggtgcactgtggcaccaatgtgtgcagaaagcccttctctttcaagtggtggmacatggtgccctgagacagctcccacccaccatcctgtccccctggggcgggcattggcccaggtggtggagacagagacaggcccctgaacgataagcaccaagagaccccaaggctccagatggaacactgagggtgaccgtccctctcagaagccttttccctggaagtgtccatgcctcacctgcaacccatgtggttctcagacttgaatcttctcggccccccaaaaagaaggacctcatttcttatagcctctcctgtgattcaacacaacccatggagatgtccccttctcactctgaaatcatccatttggggacaaatccacattggggtctagaaacatccacgtatctcatcagccatcttgtcctgtgcatcctaacagaggaaggatccatgattctgctttggtccaattgcttcctctctgcagaggaacaaccctaaaaccagaccactccacgcaggacaggcaggagagattcttcctaaagcctcccccataaaaagggagctgtggatccacttagatcagggcggaaccatctttcacccggccaagctcctgcccagatgttgaccctcacccagcgtgagctgtcacatagtaggagcttctagatgcatgtggaagcaatgagagttgtcccttagccttataaactccccatgatctgacatgcagaaatccagccttgtccagaatcctcctggaatttcttggagacgaaagtatctgggggattgttgggtactagggagactgggtacaagggtgaaaagtagttcccataatacacatggttgactatggtgatccaccttgtgatggttaatattaggtgtctggagaaggttgcttcattggccctgggacttctctctgcaggaggagagamcgctgcctctcctctggattggtctcaggctctctgttggcctttggtcagcgtttccacatcctgctctgctgcaggagagggggctaaggggctggatccaccaaggcagctcacagcgggaaaactctgggamtgaaccactgaattcaggggatgggggtgggggggcggttctcgaggtgtgtgccagctacacgtgtgttctgtatgggtccagctgcgtttccatcactcgctaataaatcaacagaaacacaaatggcttggctctcatgttgacccttctttgagcttagaatgagacagcaaagagagaggactttcttgcagctgaagcatttgctttcttgacccccaagaatttggggctgacatcccaaattttgataagactgagattgccttgtcttggccagaggatgggttaggactgccatggacacctgtaatgatatggacacataaaagcaagcctgggggtaaaatgccaggctaccaggacaagtgagcatggcaaggctaggggccgggctgtggctggaggttgcactgtggaaggatgggcaatggggagcatgtggaggccttttgtgtgtccttagcagcatcctccttccgcctgcaagaggctgcgggaagccttacttcagagcactcgggcactgtccctctgccctccaccctcccaacccctttattttccctcaaggcgcaaaacacagaaacacactcaagctcaccccgggctgggtggctagagctgtgtaggtttctccagtgctgcctccttgccgtggcttacttaggttctctgaacagattcccggtgtcccctcacatacccatattttgacaaaataagctccctccctcatttctcccagcaggggaagctgagacagatgaagacgctgagaacatcctattttctgaaagggtttggggagggaaatgtgactctctagaaggcaagtgcctaaaattcggagaacagggatgagtttccaacaggcttttctcacccccaagactggccacagggctctgggcagacccagcataaagccctggaaacagattgcctctcaaagttgctccctgtgctctaggttggtgtgggtggggcaactgagcagtgaaaaacccaaccccaaggcggacgagaagcaaaacacagttgaacacggcatccacctgtccacacagcaaaggacagggtcagtgcattactttttgaaggctactataacaaattaccataaacgaagtggcttaaaacaacacaaatgtattatcttatggttctggaggtcagaagtctgacatggtgtcatgctggacctctactgacttcagtagtagctgggcatggtggtacaggcctgtagtcctagctatttgggaggctgaggcaggaaaattgcttgagactaggagtttgaggttacagtgagcaaagatcacaccactgcactccaacctgggtgacagagtgagaccctgtctcaaaaaaaaggatagggatggcaccatgtttgagagaccaaagaagagaccaggagccagtgaccgagacataaggtttattgaggggactcatatacggggcagtgcagtggtggtgggctggacaggggaaccacctctgctcgtaaaaagcatgcagttggccaggtgcagtggctcacgcctgtaatgccagcactttgggaggccaaggcgggtggatcacaaggtcaggaattcgacaccagcctggccaagatggtgaaaccccgtctctactaaaaatacaaaaattatccaggcgcagtgacgggcacctgtaatcccagctacccgggaggctgaggcaggagaattgcttgaacccgggaggcagatgttgcagtgagccaagatgatgccactgcactccagcctgggcaacagagcaagactccgtctcaaaaaaaaaaaaaaaaaaaaagcatgcagtttatatagcattttgacttagcactctcaccctaataacctcctcctggcaatcttcatttcacccataacaaagggcctcaatcccctgtacagcctgcattctacgagataagtggtgggtcccaatgttcctcatagataagaaatgaatctccgggttggcactttccatagctgggaatcccaaatgcacattcatcagagactgtaaggtcattctcagggtatgctccagtttagctattgctggcggtgcgtctgccacacacatgggtctcactgagctaaagtcaacatcttggaagggctggttccttctgggctctagggaagaatcctttttcttgcctttgccagctcctagaggctgcctacaccccttggcttctgggcttttcctccatcttcaaggccagcagcatagtaacatttttgtatcttcctctgatggattcttctgcttccttcttccacttgtaaggacccttgcgatgacactgggctcatctggataagcaaggctcacccaccctctctaggtcagctgatgagtgaacttcattcaatctgcaaccttcattcccttttactaagaaggtcatatactcacgagttccgcagactcgaacgtggaaatctttggaggaccatttttctgctgactacaagcaaccaggccctgactgccgtttctggcctccaagagtgagaccatacccggtcccctctgaaatccacagaggcagcagcagaaagatgcagtcaatgaaccctcactctgggactggtgttcagttctggaccctccgctgggctgagatctgggatcccatggatgcaggctgggtggctccaaaaagcactggaagctgcctccatcaggcctggggtcaggggtcacctccgctggccactgccttcccagacagctgcccatgccacactgcctggtcccttccggggcctggctctcaggcctggaaagcccagggagactaggatgaggcttgggttctcgtagggaaatttcccttcaccctattgtggttcccctaacacagtgggcaaccttgaccaggcctgaggataagggaagatacccaaccgactcacctactcccagctggctgcctgaaacccctcggagttggaccatcagatgctgaactcgtactctctagctgagcacataacttgggtgagcctcagtttccccctccataaaatgggcaaaataactgccgcttcatagagcttgcatggggatgaagtagggtaactcacaagttatacttagtgtcaatagcacagtgcatggtgcatagtaagtgctcagtaaatgatgactgctgttacatagcatcccccagcccttcctcaagcatctgctgtgtagaacactcctaatctccgcgctttaatagatgacaaagaccctttgagacccagaggtgagatgagggaggtagggacaggacagctgtcttggctactctcagatcataccctgcttgtctcagctgtgtaggactggcccaggtggaggctcctgcctggacaagaagctgacaagaaagcctgtcttttttgtggggatttgcagctctgggtggccctgactcatgctttattcagaatttggaataagtagctgcagggcttccgcaggcattgcccaactctgtggcctcctgcggcttccagcagcccaggaaggagggccctgggtgaggatggctggaaaggaattctggatggctggacagagtccatgggacctatcacttcctacaaagtcactgtcatcccaagtcccctccagcataatgacggcaagtgcaagcattgtgccagcaggtactgaatgcttcctgagcaccatctgatatagccctcacagcatgccagcaggcagctattactattgttctcactttatagacagggaaactgaggcacagccacatgaaagcgcttgccctggtcacagagctattaagtgggggaaacaaatttgagcctagacacgtgacctctgtacccagtcacaccagtggttctcaacccatctacacattagaatcacctggaaggctctcatgaaaacctagcagggccaggcccccaccatcagagattctgtctggacattgggatgttacacaaagcaactcggtgactcaggtgtgtagccaggacacagcaacactttggaaggccaggcgggcagaccacctgaggtcaggagttcaagaccagcctggccaacatgctgaaaccccgtctttactaaaaatacaaaaatttggctgggcgtggtggctcacgcctgtaatcccagcactttgggaggccgaggtgggcggatcacgagatcaggagatcaacaccatcctggctaacatggtgaaaccccatctctactaaaaatacaaaaaattagctgggcgtggttgcacgtgcctgtggtcccagctactctggaggctgaggcaggagaattgcttgaacctgggaggcagaggttgcagtgagctgagatcgtgccactgcactccagcctggtgatgaagcgagattccgtctcaaaaaaaaaaattagctgggtgtggtggctcgcacctgtaatcccagctagttgggagactgaagcaggagaatctcttgaaccagggaggcagaggttgcagtgagccgagatcgcaccactgtactccagcttgggtgagacagagcaagattccatctcaaaataataataataaagaaagctctgcatggggaaaagcttagcatgaaattttggggtgagggatgggagcagggagacaagtcagaaggtggcagctagttcagccgaagagaagccaccacattcaattcactctttgtggggaaaccggaagggacgggcttactggacaggacgtggggaacagggaaaaggcagggacaagagtccctcccagagtttgagatttatttactcattgatttattatgaagtaaatcattaatacaagacaagttttttataatgtttctgaatgactaaaagaataattatggaatgaaaacctgtatactctggctgggcgtggtggctcacacctgtaatcccagcactttgggaggccaaggcgggtggatcacaaggtcaggagatcgagatcatcctggctaacgcggtgaaatcccatttctactaaaaacacaaaaaattagtcgggcgtggtggctcatgcctgtagtcccagctactcaggaggctgaggcagaatggtgtgaacccaggaggcggagcttgcagcgagctgagatcgcgccactgcactccagcctgggtgacagagtgagactccatctcaaaaaagaaaaagaaaaagaaaacgtgtgtactcagcatcttctctttaagaaagggaacattccaaactcctctgcaaccctatgggggacacttcccactccccccatacccaggattcgcgctcatctgaaatttgcgtttatcattccttcgctcctctttataatttccccatgtgagtatccctgaactgcatactgtttagttttgcctgttagaaattttttcacagggccatgttaatggtggtgttctgtgactctcttctttcattcagcaccgtattggtgagtttcattcacgttgtatgtcaccataattcattccttcttattgctacaaagcattccattttatgaatggaatttattatattattattttgagacaaggtctgggtctgtcacctaggctggagtgcagtggcacgatctcaactcactacaacctccgcctcctgagcttaagtcatccccctacctcagcttcccgagtagctgggattagaggcgtgcaccaccacacatgactaatttttgtattttttgtggagatggggtttcactatgttgcccaagctggtctcgaactcctgagctcaagcaatccacctgccttggcctcccaaagtgctgggattacaggtgtgagccactgcctggccagatgaatggaatttattatatacaatttattcatactcttttgtcaacagacacttgggtcgtttccattttttttttttttttttttttttttggctgtaacagtcaatgctgctgtcaacattcttagggatgttcctggtgtgcacattcacaagtctctctagaatatatatctagatgctttctggcttcatgaacaaggagaatggtggtgccatggagaaaaaaggcaaaggatc

SEQ ID NO: 95246 - DNA, 67487 bp, Homo sapiens
agtgtctgcattctgcttcaccttccaccatgactgaaagctccctgacgcttcactagaagccaagcggatgccagcaccatgcttcctgtaaagcctgcatgagccaatgaaacctctttcctttataaattacccagtctcaggtatttctttatagcaaggcaggaagagcctaatatactacccaattttaagatttatcatatagctacagtaatcaaaattgtgttgtattattggaggaacagacacagatcaatggaactgaatatagaacctggaaatagccccacacatgtatgcccaacatgtacaatttttgacaaagatgcaaaagcaattcaatttcaatttgttgaaagagagtcttttcaacagacgatgctagaggaaggaatgtatcttaaaataaatagtgtcataaattcagtaaaatacagtatttcttgtgcacctactctgtgctaggccctgtcctaagcactagggagataacagtgagcaaagcaaagtccatgctttcatgtcactcacattctcatggtcttggtccccaggagaaatcctgggtgccagagaagaaatgtaagcacctggtgtcaagggttgggtaggagccagttccagaaagggaatgcagagacatttgccttcatctgactggtccccttccttttctcaaaggtggcagaggggaaggttgcaggcttttgatgcagatagatttgggctccatctcctgtctctgcccctaatgtgctactcatctgtcaatgactgacattcactgggttagtgtattgttcacatgaatgggctccagtgcagggcagagcctggcacatgttagagtcatgattatgcccttgtgtgcccatgaatccttccaaaacctagaaggattctgcaagggagagaaaggagagatgctgggggcagggaagagctgtgtgaacagagaggagaaaagactgcccctgcaatacacacagcaggcagggggctccgggatgaacactttgcaggaggaaggattttcttttttttctttttttttttttttttgagacggagtcttgctctgtcacccaggctggagtgcaatggcatgatctcggctcactgcaacttctgcctcctgggctcaagtgattcttctgcctcagcctcccgagtagctgggattacaggtgcctgccaccacgcccagctaatgtttatgtttttaatagagacagggtttcaccatgttggtcaggctgatcttgatctcctgacctcagatgatccacaggaggagggattttctagtttcagccagcctggatgatctagacatgctccagtgttctgctagaagtcatgaattcagagaggctgagagaccagggttctttgtgctggaagggtcttcagaattcattggccaagtgacctggcctgggggcagctgcatagccctagagtggacgaggatgcaggggcttgggagttagaccacgcaaaattaaacgtaagtgtcaccacttccttctgcgtaaccttgagtggttacctaactcctctgagactcggtttcctcayctggaaaacggggagagatgttaaggttgctgtgaggattagagatgatgcatgttaggacctggcataggtcagggctacaccagggcatggcatgttggatgaagccaaatttgaaacccccctagaggccgtgtgaccttgagcctggtgcttcactcttctgtagaaatgagattgtacctgttgccccacttaatggtgagaattagaaataatagagcccaaggacctagtgacaggtaaacacatagcaggcgttaatagatggtggtctctattatcaccctgggtgcttctacatttatgttaaacaaagcctaggttagcttctaagcgagggccaggcacttaggaggcattcggtgaatatttgttgaatgaacagctcagtgttgggaatgaactgtacttatgcatgaataatgctgaagcaagagctaggctatctgctgtaagaacagcactgcactatacccagacacagagccactgggagagtcctctgaccctaattcctttcccccaaatgatgtcattgcaatcaactggagcaggctagccagccagtctctgggacaggagctcaggtggcctcagccctctgggccccaaatgcctagagggtatttggcaacacycagaacacccttgcttcctctgcgtgagctgggctggtgattctgcctttcagcaggaagagaggcctcttcctccagggtttctggcctggatcctgagacgctcaccatgtataagagagttcactccccaaccccaaaggtcccctttgggctctgaaagggttaatgccatcagcaaaagaaacagccaggccgggttctcagggatcttcacaggatcctgtctgggtcaagtactgggctgggtgctgggaacacaaacagccacggcgttaagccaccagtgttgagtgacaagtctaggcactggccttgctctcaggctagctgggggatgggcatttaaacacaaggtgtggcaaatctcaggaaaagaatgaagcgctctgccaaaaaactaaagaggggcaaagatgaatctacaacatacctgcaaataaccacagacacgggcacaagtgatgcatcgctgcatggtttatgacactgaaaacttgcagacagcccccatgtccaacagcaggggagcagccatgtcaggatgcagctggagctgcaggcacaggtggggcacgcgccagccccaagtctgttggcctctcattccactgcccttggctcctgccctcagccctgcccatcacagagcccgtggcccttgttccactgtgagtgaccaagtgtgtttctacaaagaggctttgcttccaaagtgcagccgttttccctcagtgtgagtgagtgtgtgtgtgtgtgtgtgtgtgtgttacaaacctagttttgcattgctccctgtgtaattgcaaatagcatgcattctcttttgcatctcctctccctcatcactcccctgggtctctggtggaggaccccagggctcatccctcagcctatctctcttccctatcctcactcattccctaggggagctggagatgttgacatctcactgttttatccttttcagcctggtcctgtctcttaagctccggaatcatgtgttcaaacgtcctacagggcatcatcacaccaaatgacacttggcaaagccaggaccaaactcctgatctccaccatgcccaccccccgcccttccctcagccttccctgcccagctgcgggcagccccatccctccagggcctcaggctccaaactgcggtgtcctcctccatccctctgtctttcttaacacccctcatccagtccctctgcaactcctattggctgtattgcatcacaaaatgtccagaacctgacccatcctcccctcctccactgccaccaccctagcctgagccccaccgtctgtcaccrgcctgtgtgcagcggccacctcacaggtcttctggcctcctcccgggtcccctacagtctgttctcacatcacagccagagtgatcacgttcaagcaagttggttcgcggtccttctctgctcaaaatgactccaggctccccatgttacttggagcagaggccaaagctcttaggatgcccgaaaggccctatatgatcgcaccccgccctgggctgctctccccctccctcactgcatttcagccacactggcctctttgctctttcttgaacccgccaggcatgtccctgcctcagggcctttgtaccgattgcactggctgttctcttgacttggaaccttctccctgtgttcctggtggcctttaccctgtcctttttcctttttctaccccactaacatacgatagaatccacttactgcatttattgcttactggctgtctctctcccaacaaaaacaaacaaacaaaaaggctctatgaaggcaggatttttgtccactttgttcacagcgtatccacggtgcctggaacagtgcctggccatcaataggcactcagtcagtatttgttgaattaacaaaactgctttggggctcgtcctctttgtggctcgttcacagcaaatttaaaccccaaactgctgaagaaaataagaaagaaaagaaggaacagaagaaaacaacctcaagagacctaagacttggggtagaggccagccctccctctgatttgctgtgtgaccgtgggcaggtcccactccctttctgtgcttcagtctccccttctgcaaaacgaggactggattgggtgttctctaagggccctcccaactctaacaatggacagctccctcctgccacttcccagtagaagctcaaactagttctaatcatgcggtcagccagagaaattgggtttattaacactgtgtgcaggcagtcatgtagatgcgtcagaacgtcggacctggccacatcatcatctgctggtacagaagataaattttgagcccagagaaggtggtctgaatccagatccccactgtagggcttatgagaccttgggggtctcactcaatctctctaagtctttgtggtctcatctacacatgggcatcctgataggacgcactccatagggatgttgagatgaggcaggatttgaactaaagcctgtttgatcccacagcctgactctgaattaatgaggcaaattctttgcttcaaagccaaagcaagcaaacaaaaaacaaacrcaagatatccaacccacgaaacrctctatgttcacgccagactcccatgcatgcaccctttgagtgctcctttttgggacccatccaccaccccccagttgcctcattaaaggcagagcctggcaccaatggcccaggtgcaaccacagctctgaggccacatgggcatccccctggcaggcgtggcccacacctgcactgtctggtctgacacccagaggccctggcaagaggcaggtatcctggagcatgcagagaacatcaacttccatgccaggaagctcatcttctcttcccagctctgccgcattctagctctggcaccttgggcaagagctagtcacttttactctctgagcctcaattttccttctgtaaaatgggttgtaatactaagcccatatacaccttgtattgtagcgagatgtagctgtgatacagtctggaaagcacgtgtcatatagacaggcagctaatgaatctcacactctggaactggacacctttggttccaattctggccctaccactctcgagctgtggaagaactgcacctccgttttctcctctgtaaaatgggtataataatggcaccaacctcagagggctgctgtgagggtgaaataaggggataatggtatgatctagttcacgggtttgtcgtaatgagctattctatgtgaagtgcaggaaaacgtgcctggcatagagaatgtgagctgtcatgtgggtggcccaggtggagagacttgtcccaagcctggttggtctttgaacgtgtagcctggcctgtgactgcttacctaaaatctccccgcttttcccaccttctcctctctgatatgcctgtttgacataggtgagattggatagatcaaggtgttcagggcctctaggcagggatgggactgtgggcatgaggaccaggacccaacccctcagccccactctccaccccaggctttctgagccatccatccttcccaagaaactgacagagccaccctgccactggtaccagcattgacacccatctagaggtccgaggggcagccccagggcagaggagattttgagagcccacacccctgacctgagtggggaggggttgagcctctgggccacagaccgcaggtgctgactcatggcctctgctgggcgatataaaggaaccagcccaggggcttcctacagccagagggaygagctagcccgacgatggcccaggggacattgatccrtgtgaccccagagcagcccacccatgccgtgtgtgtgctgggcaccttgactcagcttgacatctgcaggtaagaggggggccttctgggsttttggaggcaggtcaggagatgctggatgacccagttctactgacacaggagcatgtgtttggcccaggctctaggctccagcctctgcagccactgccaggggagtagctggagagagaagaccccagcagccctgggaagtgccagtctcatggctgtgggttctttgccatgtacaagtgcaaattccccaggaacacacsacagataaattattatggggcaaaccaggccatccrtctccctgtcttcatcgaggcaacagaagcttacagagagtctgtgacttgctcaaggtcacacagcamgtgtgccctggaagtaaggttagcccctgggcctcctggttcacagcacagtttgttaccccacatctcttagctaagcctccctcagtgggtgcrtaatagcgtgggtggggatggcgaaacggggctctgtggcgtggcagagactgaggtaggaagcctggacctgctgctggctagcaaggaggccttgggcaactgagcctcagttgcctcatctgtgaaatggggataatactcacatcatgggctggttrtaggaattcaatgtraaaaaatgtgcagatgttggctgagtacttagcacagtggtgggcccatccttggtagtttttatttactcatttaacaaatgctgagtgccatgctctgtggcagggtctgggttaaacaagagagttgaggaatgctctcggggagtgtgcagggtcattgttgttattgtagaacaggaattaaaagaaattttaaaacgtgtaagcaaaaactcagttctatgttaaaaaaaaaaaacaattttccctggggaaaaaaaaaaaaagagctggagtcccttaaaaattaactgcctgtttttttgtggctagtgagccttattgctcctctttttccaggcattgtaaagaccctgtttctccagctgtgcagctgcaaggtcactagacagataaactcaagctgtaaaaatttttttccttaaaaagtaaaaaataatataatgcatgtctcaattaaataactgtctttgtttcttgcctctataatatgcttccccctgcacagatctacccccgccccatgaaatgcttaaaagataacttaactctttgttcagggctcagtcttttgaaatgttagcctgactgagccagtgaatctaaataataaatcctcctcaacccctcggtctctctgattcctaaattatcctgcaacaattgctgttgtcaggaataggagtggttgcccctggcttccccatcccagtctgggcatcggtggccctagaatggtgcccacaggagtgccggggacatttctttgctactgcctgagccccagcagccagagaacagcaggaaatgtcgggatggtctcccagggccacatggtggaggcaggagaccaagaagttggggagaaaargaaaaagaaaatcacctgacatcatctgaggcrcccccaactcctctgagaatgggtgtgaaggaaatgacaggrgctgaagctagcccagggcctctcccagcatgcccaggctagccctctacccagcgtccatgagtagtaatcaagatcacaagtgcttcctctggccctagagaggtgggtggacagctggtcagtgttgggcagagaggaaggcactgcccatttctcccagaaaggatggggactccggagttcacaggggcctctaaatccttcttttctcctccttcagccacacgttgagcctgtcactctatcccctgaacatctcacgtaacaatggctaatatttacatcacacttcctacattcaactcattcaatggccttgggaggcaggtaatgttgttattcccattttacaraagaggaaacagaggctccaagaagttaagtaacccacctcaagccacacagctaataagtaggggagccaggactcaacccaggcagcctgactctaggaccctccattctccccatgggtctccgttccagaccttccygtcacttcttatctgttcttaacatagccccagacagcgcctccctcccatctcctgagcagccatcggcctcttcctgaaccacacaggtgggagggccactccctcctcacctccgcccctcatattcatgcctccataactttgctcaagccattctctctgtccccaaagtcaggaacccgggaggcagaggttgcagtgagccaagattgggctagtgcactccagcctgggtgacagagtaagactctgtctcaaaaaaaaagaggcaaaaacacctaaccgagggtcacataaattaaaggtggcaagctgggcacggtggcttatgcctgtaatcccagcactttgagaggccaagatgggcaaatcacttgtggtcagaatttcgagaccagcctggccaacatggggaaaccccgtctctactaaaaatacaaaaaaattagacggggcgcaatggctcacatctgtaatcccagcactttgggaggccgaggcaggcggatcacaaggtcaggagatcgagaccatcctggctaacatggtgaaacaccgtctctactaaaaatacaaaaattagccgggcgtggtagcacgcagctatagtcccagctacttgggaggctgaggcaggagaatcgcttgaacccaggaggcggacgctgcagtgaaccgagattgtgccactgaactccagcctgggcaacacagtgagtctccgtctcaaaaaaaaaaaaaaaaattagatgggagtagtggcacatgcctgtaatctcaactactcaggaggctgaggcacaagagttgcttgaacctgggaggtggaggttgcagtgaggcaagattgcaccactgcactccagcaagggcaacagagtgagactctgtctcaaaaaaaaaaaagttaaaggtggcaaagccaggactgtctgaccctaaacccaccctgcttcgcagcccaccctgcctccaaatgctggggagtggactcccctgggcactgctccctgtgggcagagctcattcaacttccaaaggatttggtaaaggcctagaaggggtgggggtccaggaggtgccaactgcaaagggcagtgtgcattcagaagctgccatctatggtctctcttcttcctcccaaagtctccttcttcttttttttttttttaaaaacggagtctcgctctgtccagcccaggctggagtgcagtggcaagatcttggctcaccgcaagctccacctcccgggttcacgcaattctcctgcctcagcctccccagtagctgggactacaggcgcctgccaccatgcctggctaatttttttgtattttcagtagagacggtgtttcaccgtgttagccaggatggtctcgatctcctgacctcgtgatccacccgcctcggcctcccaaagtgctgggattacaggcttgagccaccgcgcccagccgggtttccttctgaatagaccagttggcatgacagtggggagcctggacaagtctgtttgtctctctgagcctcggtttacccatctgtaaaatgggaaaattaacaccccttcctgggttacggcgaagattgaattatataatgcacacaaagtgtctggcagaggggtcccctttccaatgcaaatcaaagaaaatgactaaagtgagtgtcaatcattttcagaggtttatttccaaggttaaggacgtgcccaggaaaagaatacagaaacaggaaaaatctgtagtccgtgctttttcctaaatgggtctgggacttcaatatttaaagggaaaagagtgggaattgggccggatgtggtggctcacgcctgtaatcccagcactttaggagaccaaggagggtggatcacctgaggtcaggagttygaaaccagcctggacaacatggtgaaaccccatctctactaaaaatacaaaaattagccgggcgtggtggcagacgcttgtaatcccagctactcaggaagctgaggcaagagaatcacttgaacccaggaggcggaggttgcagtgagctgagattgcaccattgcactccaacctgggcaayaagagtgaaactccgcctcaaaaaaaaaaaaaaaaaaagtgggtattggggcaaagaggaagaaagaaaaaaaagatgggtagataagaggtaagtggttgcattgagtctttgatcagctttcactgaatacattttccgtgtgaggtggggagaggaatagtcacttatgccttgagctcagggaatctatattgtcacaaatgataaacatagagcaagggaagaaatcagatatgcatttgttgcaggyaagcagagggataactttgatttctgtcctttgttccatgcctgtgaagataagctattaacttacattgtcagggtgaaattcaacagaactggttcacgggaaagatcttagggctcacaaggaatttccttgtcggcaaattgtgagggagatatgtagcttttttttttttttttttaatctttgtagctatcttatttagaaacaaaatggggctgggcatggtggctcacgcctgtaatcccaacactttaggaggctgaggcgggcagaycatgaggtcaagggatggagaccatcctggccaacatggtgaaaccctgtctctactaaaaatacaaaaattagctgagcatggtggcgtgcgcctgtagtcccagctactcgcgagggtgaggcaagagaatcgcttgaacctgggaggcggaggttgcagtgagcagagatggcaccactgccctccagcctaggcgacrgagcgagactctgcctcaaaaaaaatagaaagaaagaaacaatggggccaggcgtggtagctcatgcctgtaatcccaacactttgggaggctgaagtgggcagatcacttgaggttaggagttcaagaccagcctagccaacatggtgaaaccccatctctactaaaaatacaaaaacttagccaggcgtggtggtgcatgcctgtaatcccagctactcgggaggctgaggcacgagaattgcttgaacctgggaggcggaggctgcagtgagccaagatcatgccacggtactccagcctgggcgacagtgcaagaccttgtcaaaaaaaaaaaaaaaaaaaaaaggaaaggaaggaaagaaggaaagaaggaaagaaagaaagaaaatgggaggcagatttgcatgacccagttcctagcttgactttccctttggcttagtgagtttggggtcctgagatttattttyctttgacagcagcgaggactgcatgagcctctgtgtgtgagagtggcagacactgaatgccaccctcatgggggtggttgatcaggagatggcggatgctggagttggaggaatgatgtcactgtctggggctcaagctcccagtgctggctgtatggagggtgttggaagttacaagaagattcagctctggatggtcttatgataacacatgtgggtcacacgcytgagggcatgcacacacctggtgtgaacccccagatgtttatgaaagttccttgtttaggagctgagaacatctggaacacagccagaggaagcacactcatcttagaatcgaatcccagtggcccagttcccagctggcccttacctctctgagcctcagtttccccatctagcagagagagtggctataaaggtgccagacccacccgtttgtgcccttctcccttcccctcttgaggaagccacatgggacagagggggctgaggcggacctagcccctcggtccacctgctgtgtgcccctcggcctccattgtcttttgagccccttattcatcttcttggtggaccagacacagggcgtgtccctctcctgtccccatcctctgaccacagtgcccaggcagttggaagkcctggcttatcactgaggctttgagagaatgaaggaaaacaacagcacacagaaccaagagaatgagcctccaggctttggcagagaaacaagagccttggttaagttttggttcggccaggtaggtgtatcataaatggaggcacctgagcagaaatgcaccagagccactggggcatctcctggccgggaactgccccctgggctgagctgtctgctgcttcatttattgttattattagtagccgtcccatactgagcagttaccacatgccgggccctccaaaccttgcaaccacccaggaagcaggtcgacgtgattcccattttacagagaaggaagctgaggcccaggagaggtcagtggctaggccaaggtcacagagcctgtcagaagcagcccaaggtcattgcctctctcactcccttcgaggctgcctgctgctcctggcctggcctgggagacgtttcccckgggcagctgaaccactccaccccagctggtctgcaggagrgtatctgatcccaaactgctccaaccagctggtgatggctgagtgcaaaaccacaagcacatgctgtgccctggctggctggtrtagayagactggcctgctgtggtatgtggtgtgttgggaattcgtatgttccrttcacactgaccctggcaatctccccgaggcccaggtcagtgccacccggggtgatgacaacccagccatcctgctccccacccccgtcagcatgggaaccaggctgggagcaggtgggaaagccaccacctgagctgaggggacaggcagggacagccatggcttgagtttagcagatgtagaatgacgtccttgtcaaggaggactggggggagtccacaagggaaccccagattttccaccttgycccatccacctttgtcctcagcacaaggtctggtacacagtgaggggtgagtgagtgtgtggtgattgatwgattgattgaatgaacgaatgaaggaatgagtgtgtgttttaagggaaactatgcctgtcacacaggaggtgctatttaagtgtttgttgagtgaatgaaagaaagttgagagcaggaagggtgtcattcctctttgcatcccctataatgtgtgggacgtacttggcactcagctmtcatgaaatctttttgcaacaagagcaggcggaggataaaagggaaagagagaaaaattgagagggatatggagagaaagagaacatactcaaaaacattccaccatcctgacatcagccaccaccatcccttacagcgcaggagcccctacatcccaggccactgggacatggttttttgcttccatggcccttcgggaaggacccccaacactggctcctttggtcaaagactgcagtgtgagttcaacaggagagagagaaggggaggagcaagtaaaagaaaactttctaaaaatcggtgcctgctgtgacccacacccttttctcataccttcccttgtagccctgggaaagaggaattcttcctttccatttttggagaaaattctgggatcctacactgggttcccattcaggggctgctctctcaacccccagtccccacccacggtgacctcacagcccccagggctacacctgtcacttgaacctggctgcctccctgatgacccacagctctgccctgacccctcctctctcggcccctatccacagggtgcctccacccagatggcccggcaaaaacaaaaccagcctggctccctgccttttcctcctcctgatgaggaggctgccacccccatcttcccatttatgtcgataacactcctggctggatgcagtggctcacgcctataatcccaacactttgggaggccaaggtgggctgatcacatgaggccagaagtttgagaccagcctggtcaacatggcgaaaccccgtctctactaaaaatacaaaaattagctgggcatggtggtacacgtctgtagtctcagctactaaggaggctgaggcgggagaatcatttgaacctgtgaggtggaggttgctgtgagccgagatcacaccactgcactccagcctgggtgacagagcaagactctgtctcaaaaataaataaatagccaggcgcggtggctcacgcctgtaatcccagcactttgggaggctgaggtgggcagatcacgaggtcaggagatcgagaccatcctggctaacacagtgaaaccccgtctctactaaaaatacaaaaaaattagccaggcctggtggcgggcgcctgtagtcccagctacttgggaggctgaggcaggagaatggcatgaacctgggaggtggagcttgcagtgagccragatcgcaccactgcactcgagcctgggcgacagagtgagactccgtctcaaaataaataaataaataaataaataaataaattaattaattaattaaaataaataaataaataaaataacacccctgcccaaaaacaacccccccacccgtctcccctgccccgcgcccagcttctatctgtagctgcatttcagccgggcattcagtagaagctgtgggactgcatgactggggcagagcctcagtgtgctcatctgtaaaatgggaagagggatgcctgcctcacagtagcaagacctcatagtgctgccgtgaatgttcagccgatgagacagtgtgtgtagaacgccaggctcacagtagctctcaacagataccagtgtatgcattctctccagcctcagtttcttcatttgtagaaggggaactccaatagtacctatgtcgcagagttgtcatggagatgcctgtagagatggggtttagccatgttgcccaggctggtctcaaacttatggactcaagcaatccacttgcctcagcttcccaaagtgctagggttacaggcatgagccaccatgcctggctgtgtgtatggcttttctgcataagaaaatagcaataacaatgcacgccacagacataatgccgacggagtctcgctcttgtcgcctaggctggagtgcaatggtgagatcttggctcactgcaatctccacctcccaggttcaagcaattctcctgcctcagcctcctgagtagctgggattacagacacccgccaccacacctggctaatttttttgtattttgagtacagacggggtttcaccatgttggccaggctggtctcaaacacctgacctcgtgatccgcccgtctcggcctcccaaagtgctgggattacaggcttgagccaccatgcctggccatcataatgctttatttattctgtcctgtgcatcatggcatggttccctcagattccactcaaaaatcagggtaattcagcaaactcgtattagcatcttctttggcagtggttctcacacttgagtgtgtatcaaaagcatctggagagcgtgttaaaacacagattgctgccgggcactgtggcttgcgcctgtaatcccagcactttgggaggccaaggcaggaggatcacttgaggccaggagttcgagaccagcctgggaaacatactgagactctcatctctataaaaatgttttttaaattagctggatgtggtagtgtgtgcctgtagtcccagctactcaggaggctgaggccggaggattgcttgagcccaggagttcaagtctgccgtgagccatgattgtgcctctgcattccagcaagacctcctctcagaaaaaccaaaacaaacaaaaaacacacacttctgggccccactcctagagtttccaactcagtaagtctgagtggagcccaagaatctgcatttttaacaaattccccagtgaggcagatgctgctgttccgaagaccacactttgggaagcattggtctttaggaagtgctggatgctgggcacagcagagtggcaccaatgcagagaaggaggtagtcgtgatgtggcaggaatggcaccaggctgggctgcaagaggacccagacctgccattatcagccagcacccagaaacgtcactttgcctctctgaacctgttttctcatctgtaaaagaataacaatggctcactcataggatgattgtgaaaacaaaggttaatggccacacagagaaaggtgactagcttgtcatctgctgcaggcatgtgaacaccaactcaggcaacagtgtcaggacgggagaaggtgccaagaccgaaatgtcactgaggatgacagaaattctaaatgtcaaactcccaaacggaggcgggaagaataacctgactgctgagtgtgtcttaatgtcttgatcagacttcctgtgactttgagctctgaataaacatttttatattttcaccttttgccgttcatatgcacacaaggcgaaaattggcatgctgattttttttctttttttttttttgagatggagtctcgctctatcacccaggctggagtgcagtggcgcgatcttggctcactgcaaactccgcctcccgggttcatgccattctcttgcctcagcctcccgagtagctgggactacaggcacccgccacaactcccggctaatttttttttgtatttttaatagagatggggtttcaccatgttagccaggatggtctcgatctcctgaccttgtgatccacccgcctcrgcctcccaaagtgctgggattacaggcgggagccactgcgcccagcctttttttttcctttttgtggagacagggtctagctattttgcccaggctggtagaaagcagtcctcccacctcagcctcccaaaatgctgggattacaggcgggagccatcgtgcctggccagtatactaacttttaaaaaaatctactaccacatgccccttgcttcttcctttttcttaggaagatgctgattttggttcaagtgtttttttgattgtctgccacttttccagacctcggccatcatatcactcaagagtacagggttttacctaggatcaagagagagacagaggcatggcgtggtggctcatgtctgtaatcccagcactttggaaggccaagatgggaggatcccttgagcccaggagttcaagaccagtctggagataaggagactccatctctacaaacaataattattttaaaattagccaggggtgatggcatgtacctgtggtcccagctactcaggaggctgaggtggaagggtcacttcagcctgggaggttgagttgcagtgcactgtgcttaaaaaaagagagagagagacattcaaagacagagggtgtattagtttcctatttgttaaaagaaacacaagacaaattaaatttaatagcttagtggagcaaagaaccattagtgaatcaggcagccccttttacccaaaccagaataggttcagaaagactcaggagctgccacatggttgaacaatatttacggacagaaaaacgaaagtgacccacagagcacggaagcgaggctcagaaacagctggattgactacagctcggcatcggcctcatttgaacatggtttgaacagttggctgcctgagatcagccaaaacagtgcttggtataaaagtaggtcacgggctgtttacacctccagttaggttacagtttactatgtacgaaaaaacctttcagccgaacttaaaatacctaaggaggcagctgtggggtaaacttaatataacacattgctgctgtaacaaatcactacaaacttagtgacttcaaacagcacaaayttattacttaccagtttgcaagatcagaagtccaaaatatgaatcttacttggctaaaatcaaggtgtcggcaaggctgtattccttctggaagctccaggggcaaacccattccttgcagcttctagaggtgcccgcattccttggcttgtggccccttccagcaayagcatcactctgatctctgctgccatcaccacagtttccctgactcagaccctcctgcctccctcttataagacctttgtattactggaaagtggtcccratccagaccccaaaagagggttcttgaattttgcctgagaaagaattcaaggtgaatccataaagtgaaagcaagtttattaagaacgcaaaggaataaaagaatggctactccatagacagagcagtcccaaaggctgctggttgcccatttttatggttatttcttgattatatgctaaacaaggggtggattattcatgagttttcagggtaaagggtgggcaattccctgaactgagggytcctcyactttttagaccatatagggtaacttccaagcgttgccatagtatccgtaaactgtcatgacgctggtgggagtgtcttttagcatgctaatgtattataattagtgtataacgagcagtgaggacgaccagaagtcactctcrtcatcgtcttggttttggtggggtttggccagcttctttactgtcacctgttttatcagcaaggtctttatgacctgtgtcttgtgctgacctcctatctcatcctgtgacttagaatgcctaacttactgggaatgcagcccagcagatctcagccttattttatgcaacccctattcaagatggagttgctctggttcaaatgcctctgacacttgtggttacattgggcccatctggctaatctaggataatctccccatctcaagatcgttaacttaatcayatttgcaagtttccttttctgtgtaaggtaacatcttcacaggtttgggggactagggtgtggtcatctttgggagaccattgttctgcctaccacagagggctgatctcattttgaggaagaaatcccttttggttggagtgataaagggaggattcgatggcagagaacccactgagatgggcctttggggctggattggattctgcaagaaggatgtgggaagggagagccctccagatgaggggcaggtgagaagcaaagcccgggagatgggaaagtggggggcaggtgcagggaactgtgggccattcagtctgaccatagcacagggagagcagcacgggggaccactgggggccaggccagggcccaccctcactctctttatgaagcagagatccaatatacctaactcttgagtttgggaaagtgacttcacctytctgtgcctcagtttactcatctgtaaaatgaacagtacccgccttacaggctagtggtgagaaccgaattaattaacgtgtggaaagaatgtgaacagtgcctggagcagagtaaattgcctgtaagtaattgctgtcatttaagaatgtgaaattgacttcgtgagggtagaatgagagcccaagccagggtgggcaggagatggaatgaaatctcctcttctgtctacttcagacctcttaggttcttcaaaggctatgtcaaattccatctcctgaaggatcaacatcagaatgttagtgattgtcttgtaaatcaatgaaaatgaccaagatgagtgtcaatcattttagaaggtttatttgccaaagttaaggacccgtgtctgggaggcaggtccatgcccttctctgaagatgattttgaggccttggatatttaaaggagaaagggcggataatggaagaagatgaagaaatttttttaatgtgtgggtggataagagacaaacagttgcatccttttgagtctttgatcagccttttactgaaaacaccattttcgtgtgaggcaaggtagaggagtagtcacttatgcattcatctagctcagtgaatctgcatttttacatgagattacataaatatagcggagaggaagcaattacatatgcatttgtctcaggggagcagagggatgactttgagttctgtcctttgtcctgtacctgtaaagataagctctgtcctttgccctgtacctgtaaagataagctatcagctgggcgtggtggctcatgcctgtaatcccaacactttgggaggccaaggcgggtggatcacctgaggtcaggagtttgagaccagcctgaccaatatggtgaaaccctatctctactaaaaatacaaaaaattagccgggagtggtggcatgcacctgtagtcccagctacttgggaggctgagacaggagaattgcttgaacctgggaggcggaggctgcggtgagctgagattgcaccactgcactctagcctgggtgacagagtgagactccatccccccccaaaaaaaaagataagctataaatgtacaattgctagggagaaattcaacagaactgttttagggtaaagatctttggggcccacagggaatttccttgtgggccaattgtgagggaagtatgtagctttttatctttatagttattttatttatgaaccatgagaggcaggtttgagggacccagttcccaggactcttccctttggcttagtgagtttggggtcccaagatgtattttcctttcacagtctgtaagtggtaagattcattttcttctaggcaatttatgtcttcttccctcccttccttctttctttccttcttctttctctttttctctctttctccccttctccccctcccacttcttctttcttctggtatactgtattagctatctatactgtgtaacaaattgtcccaaaacttagtggctcaaaatgataacatttattatatcataatttctataggttagcaatccagtatggtttagctgggttctctacttcaaggtttctcataatcaaggtattggtagagccgtagtcatgctaaggctccaccagggaaggtgacacttccaagcccactcatatggctgttggtaggattcagggccttgcagggtgttggaacctcagttcctccctggctgttggctggaagcctccctcagtttcctgccacattggcctctccatagctcacaaaatggcagcttgcttcatcaaggtgagcaaggcaagagacaggcagagagagaggcagagagagagacagagagagaattctattgtaaccttatgacagaagtgatattccagcacttttacttccttggttagaaggaagtcagtaggtccagcccatactcaaggggagagaattacacaagggcatgaacagcagagacgggaattactggggaccatcttagaagtctgtccaccatatacttttcctgtagtttcctaattctttataatgaatacatataactcttaatatagagacaaatattcaatacaaagataaaaatagaaaatgtaatcctaagccaggtactgtgattcatgcctgtaatcccagcactttgggaggccaaggcagcagatcacttaagtctaggggttcaagactagcctgcatgacatggcaaaaccccatctctacaaaaatacaaaaatcagctgggtgtgatggtgcacacctgtagtcctggctacttgggaggctgagatgagaggctagcttaagcccaggaggcagaggttgcagtgagctgagatcacaccactacactccagcctgggcaacagagatctcacctcaaaaaacaagcaaacaaacaacaacaacaacaaaaaaaacacaaacaaacaaaaaacacatgtaatcctaagtgtttctgtgaccttatgtggacggagttctgcctctctagggattgtccactgtgaatccactataatttattagctattcttttgtgggtatttagaccatgtttcattgttcacattacagaaagggctgctctgaactttcttgaacatgtctcctagtgaacacatgaaagagattctccagagtatctgcctagaagtcaaattgctgggtttggggctggctaataacaccaagttgggttttttttgtttttttttttttgcaaaatggttaatttcacactccagtaagcagtgtgttagagtttctgttgaatcgtgtcatttatagtgttatttttcaccaattgagtgggtataaaaccctatttctttatggtgttaaccttttcattctcttacttgttagtaaggtgragtgcctcttcatgttttcatgttgatttgcctaagttctttaaatagtctgcatgctaagcctttgttggttttatgttgtgaatatattctccttacattgtgcttgtctttttactttatattgtcttttgattaacagaatttattttcttttttaatttttaaattgatgttaattttttaaaaaayagaaacagggtctcactatgttgccctggctggccttgaactcctggctcaagtgatcttcccaccttggcctcccaaagcactgggattaaaggtgtgagccactgcacctggcctatttatttacatctagttgaattttttgatcttttccttcaggtttactggttttgagtcttgtttcagagaaagcataaatatgttatcctgtatcctcttttagagattcaaagttctgactttcacatttaagtctttatctccctccagctgatttttgtgtatggtgtgaggctgggatcaatttaattatttttccaatttagtattttctatatgaatgagcaattgctccagcaacatttatgatatagtctctactacctccagccatctgcaagcctatttctgtcatagatcaagttgtatgtcctttaagttttatccttcctttgtcttggcctgagccattaaaaccccatcttaagttccatggctttataggaagtcttatacctggttgagaaagtgcctcaccttttactactttcctttacaagtaccttgaccaacttagttcctggatttctcgtgtagatttaaaaatcaacttgtcargttccatargaaaccctaaaattccattgaatatataaatccattggagagaattcatacctttayggcaacaagscttcctaaccatatacakagtatttctatttatttggatcttctctaatggctttcaataaagtttgaatattttcttcataaaaatcttacacattttgctagatttatcctaggtactttacagtattttttccttttgtaaattacatcagttttttaaaaattgttttcttcttaaagaaatggtttgctagaaaaaaagaaaaatatttgtttcctrtttattgctgatgtatagaaatgtaatttattttttcctctttactttattagtcaccttattaaacttttgtctttttatttatttttaatttttaaaaaagtttaattcactcttttggagtttgcagacaactgtattttctgtcaatattggcagtttttttcttacttttcactctttatatcttttactttatgtctttttttctcttgctgcagtgcttagaatcatccacacaatgttaaaaagatgtgactttttgatcctaccacgttcctgatttttttttttttaaacagagtctcactctgttacccaggctggagtgcaatggcacaatcttgactcactgcaacctctgcctsccaggttcaaacgattctcatgcctcagcctccccagtagctgagattacagacgtgcactacccagttaatttttgtatttttagtagagacagggttttgccacgttggccaggctggtctccaactcccgacctcatgggatctgcccacctcagcttcccaaagttctaggattacaggcatgagccactgcacccagccccatgtttctgactttaaagggaaggttttcacattttccctgtcaaacaggacgttctctgtgggtcttttgttaaccttttatcaactatctacagaaaaaaaaaaatctgctttatcttcagtaatatttcttttgctttcctaatattttttctcttgatcaatgttgccagagatttgtcagttttattggtctattctaagaaccaacttttggctttattgatttgttttattatttcacagatttcttccaactttattttattttgggattttacattacattttctttttctattaattttcagcttttactttctttttaaaaatataaacatttaaggcataaagtatcacttttacatctccccaaaagttttgaaaatagtattttagttattgctcagtcctaagtattattacttaatttccattattaattgtcctttgacttgtaagtaattgagatgtctggttttaaatttccaaatgtatggtgcttttaaaaacatactttatactagtgacttctaacttagttacattatgatcagagactctgctacccatatattacctatgctttaatgtttgtcacactgtcattgacttgctttatggccaattacatagtcacttttttaaatgacccatgacccgtgtgtgctttgcttgggaaaatgtmtatttgctacttgtgggatacacaattctatatatatcgactaaatcaactttgttaattatgttagcaaaatctgtatcattacttaatttttatctgcttaatctattgttgattgagaaagaagagttgaaatcttcaactctgatggtggttttgtcaacttcttttccctatgaatgtatttctattaatgtttgccttatatgcttttttttttttttttgagacacagtctcaccctctcactctgtcacccaggctggggtacagtggtgcaatattggctcactgcaacctctgcctcccaggctcaagtgatcttcccacctctgcctcctgagtagctaggactacacgtgcatgccacagtgcctggctaattattttgtattttttgtagagatggggttttaccatattgctcaggctggtcttaaactcctgggctcaggcgatctgcccaccttggcctcccaatgtgttggtatgagccaccatgcccagccttgctttatatatgttgaggctcttattagatgcatacaagtttagaatatcttctaggtaagttaaaccgtatatcattaggttgtaatcctctctattgataccaatgtgttttgtctaataattcattcttttgatattaatatatccatcccagctctctttgagttagcatttgcttaatgtatcttttatcctttttaaaaatttttcaacttttctggatcgttatattttagatgtgtttcttataawcagtatattactggattttgtttatttaatgaaaactctcttttaactggcaatattaatcctgttatatttattttgattatttactttttttttttttgagatggagtctcgctttgtcacccaggctggagtacagtggcgtgatctcaggttactgcaacctctgcctctcgggttcaagcaattctcctgcctcagcctcccaagtggctgagattacaggcacgtacaaccatgcccagctaatttttgtatttttttttagtagagactggcttttgccacgttggccaggcyggtctcaaactcctaacctcaagtgatcctctcacctcagcctcccaaagtkctgggattacaagcaattatttacatatttggatttgttctcaccaatcttttatttttatttgtccaatttctccctatgtggccttttctctttccttgcttttttggaaggcagttctcctattcattttcttattattgcattttttccatgtgtagaaatttataaatgctatttctattattttggtgaatatctttatttattttgtttcttaaagacaggttctcactctgttgcccaggatggagtgcagatgttgtggagtgcagaatcatggctcactgcatccttgacctcctggactcaagtgatcctctttcctcagcattttgagtatccatgactacaggcacaagccaccatacccagctaattgttttattttttgtacagacaggatcttcctatgttgcccaggctggtctcaaactcctgggtgcaaacaatcctcctgcctttgcctcccaaagcgctgggattataggcatgagccaccgtgctcggccaaagacctttaaaagtataggccaggcgcataaaagtttaggccaggcacagtggctcatgcctgtaatcccaacactttggaagaccaaggcagaaggattgcttgaggccaggagtttgagaccagcctgggtaacatagcgagactctgtctctacaaaaaattttaaaaattagctgggtgtggtggcatgcacctgtagtccctgctacttgggaggctgagacatgaggatcacttgagcataggaggtcaaggctgcagtgaattgtgatcacgtcactgtcctctaccctgggtgacaaagggagaccctgtctctaaaaaaaaaaaataagtttaactctaaaaaatctagagttaaacaatatcttaattcccattttaatcaaggacctcaaaatacttcaactctctcatcctcctgccaaattatattctgccttttttatcccacagtttttatgacttttttgtatacaatgttggtttagatttaccaaaatatttaccattttatttgttcacgattctttgttgcacttcagaccattcttatgacatcagatacctccatcctaaactaygccttcagaaattgccttggtgaaaatctgattttaaaatatcggtttttgttcatccaaaaatatctatattaagatatttttattatgatatttattaagatatcttaatataataaattatattaagatataatttattaataaaatattaatattaatattttattagtatcttaataaatatctttattaagatattttttgtacgagtgcacgattctaggttaacagttacaaytgacccttgaataacattgyggataggactgctgacccccaatgtagttgaaaatctgtgtatacgggaggctgagggaggagaatggcgtgaacccaggaggcagagcttgcagtgagccaagatcrcrccactgcactccagcctgggcgacagtgagactctgtctcaaaaaaaaaaaaaaaatagtaaatcttgtataactttgactctccaaaacttaactactaatagactactgttgatgggaggcttaccagtaacataaacagttgattaacagatattttgtatgttacatgtattatatactgtggtcttacaacaaagtaagctaaagaaaagaaaatcataaggaagagaaaatacatttactgttcattaagtggaagtggatcatcataagggtcttcagcctcgtcttcatgttgagtaggctgaggaggaagrggggttggtcttgctgtctcaggggtggcagaggaggaaggaaatcagagtagaagtggactcacgcagttcaaacctgtgctgttcaagggtcaactattttcccgaaatactataaagagatgacacaactgttttttggatgtcactgttgttgacaagtctgcttccaatcgaattgttatttcctcctagataatccgactttcctttctgaatgcctttaagatcctctctttgtctttgatgttcttcactttgaccactgtgtatgtgcatgtgtgtgtatgtttgtgtgcacatgaagaaggctaattctgggagatgtaccttatttctcatgagttcagcaatactttaaaaagtatattttatccatgatccagttgtttcttaagaggaaggtccttcagagtacctggtctgccacaattccagaagcagaagtctatgatgctttgtacatgcacaatcctgcgtgtgcacagtggcgtggtggaaacctctgggtggacacacccctccatgcctacatctgtgtgtgtgggagcctttagtgtgcccatccctctgctatttttctagttcaaatgcaaacccttcaggtcaggggattcgctttctgtcagtctcattccctcctgacaaccttacagtacttactccccacggtcagagtaagcactggctgctgtttggtttttacacctgttgggaaaaggagtatattagtcagggttctccagagggacagaataatagggtgtgtgtgtgtgagagagagtttattagggagaactggctcacacgatcacaaggcaaagtcccacgatctgcaagctggggaagagagaagctggcagtggctcagtctgaatttgaaagcctcaaaccaaggaagccaamaatgcagccttcagtctgtggccaaaggcccaagagcccctagcaagccactggagcaaktcccagagtcgaaaagccaatgaacctggagtctagtgtctaagggcaggaggagcgggaggaagcatccagcattggagaaagaaggcagccagaagccccagtgagcaaggtgatcccacctcttccacctgtttttgttgtagccttgctggcagccgactggatggtgcccacccatactgagggtgggtcttcctctcccagtccactgactcaaatgccaacctcctctggcaacaccctcacagatacayccagaaaaaatacttcgcatctttcagtccaaacaagctgacacctaatattaaccatcacaaggagaaatgctgggagagccatggctggcccagcccctcctcactgcatcytctgctttcccatgtgtcttgtccacagctctgcccctgaggactgcacgtccttcagcatcaacgcctccccaggggtggtcgtggatattgcccacrgccctccagccaagaagaaatccacaggttcctccacatggcccctggaccctggggtagaggtgaccctgaygatgaaagyggccagtggtagcacaggcgaccagaaggtgagtgtcatagctgtggggtggcagtgtggatgggcttcagcagggcagccacacacactctgtcctgccgtgatccacagcaccagcctggcagagcctcttgccctgtggaagagctcgtgatggcttcttccagccatagtgtccttggggacaataatatacggctaccaggggttcatggaggtcagggtttagattaaactctattcagcaaatctttagtcagtacctaacacatgccagacactgctagacactgccaggcactgggaatccagaaatgaataagacagctgagggtgcagccctcatggggcttacaacctatgaatggtagcatcagagaatctactggtaaacaaacaattgcaaatgatactgagttctatggaggccacaaactggtagccccaagggatgctggtccatgctcctggatcggtttcctgtgtctggtatagaaaatcaccatggtggcctggccgggcacagtggctcacacctgtaatcccagcactttgggaggccgaggcgggtggatcacctgaggtcaggagtttgagaccagcctggccaacacggtgaaaccccatctctattaaaaatacaaaaattagctgggcgtagtggcgagcgcctgtaatcccagctactcaggaggctgaggcaggagaatctcttgaacccgggagggggaggtttcagtgagccaagattgcgccacttcactccagcctgggtgaaagagcaaaactccgtctcaaaaaaacaaaagaaagaaaatctccatggtttgcttaaaacaacagaagtgtatcctctcactgttctggggttcagaagtctgaggtcaaggtgccagcagggccagatttttctggaggctccaggggagaataattatttgcctcctccagcttctgggggctgtcagcagtctgatctgtggctgtctcactccagtctgcttccatggtcgcactgcctctgccccttctctgtggaatccccctctgcctctctcataagggtacttgccatgggatgtggggcccagctggatggtccagggtgatctcctcatctcaagatccttttttatttttttgagacaagagtctcgctctgtcgcccaggctggactgcagtggtgcaatctcggctcactgcaacctccgcctcctgggttcaaacgattctcctacctcagcctcccaagtagctgggagtacaggcactcgccaccatgcccagctaatttttgtattttttttagtagagatgggatttcgccatgttggtcaggctggtctcaaactcctgacctcaagtgatccactcacctcggcctcccaaagtgctgggattacaggcatgagccaccgcatctggtctcaagatcctcaacttagatctgcaaagactttttttccaaatgaaatcacatcgacaagttccagggattaggatatggatgtatctttttggggaccaccattccacctactacaccccctttgcctgtwgatgggctcaacaggaccctctggggttcccacagatctctgggccaacagccacttattcccagcagaaccagccaagcaggcttctccctgggggaacacagagcttgaytatccaggcaggctggggagggggtggtcggggaaggcttcctgaaagaagtagcaagctgaagggtgacacgaactacccacctaagagcaggagaraggagagagtttgacacagaggggcaggctgtgtgcactctctggatgagaaaagggtgagacacgtgttggggaaactgaggaagttctgtatggcaagaaaggtagatggaacaggaggtgaaggagtcagtttgaagagtttggtatcagggacctcattttctgcraacaacaggaagccaacaaaaagttttcagccagcgaataacaagacagcatttgtactttagaaggatcccaatggctgtggcctagcaagtagataggatctagggagtgggtgggaggcagggagaccagacagaaggctgacaccatggtccaggcagaggcagtgatggccgtggcgttttcctggatttccactgtctacagggcaggtccgagcacctccgcrtggcccctcaggagctcctcttcctcyggtggcagctctttggctctgctttggaaactccccaccgccattttgcttggatgtgtcaacccagatgctccaccctcctctggccaatccgaggtgttctcctaggatttctgaaccttgggcacagtggattggtgttttctcatctcttcctgaagaaacctccatccactcaaagctcctgctccccagatcccccaggacccggcctttccagggtctggttcttcrggtctttccttgatcccttctgcttgccagagtcagttctgtggcttatgatcagctctctctagcgcctcttctgccccatctccagctgctgggcccctactccctttcccagatctacctcaaagcacactccttcacaaacgaccctgccaggcagagtgtctccattgctgggcccccataggatgctcttctgtagcaccagtcattcaagctttttgctttccctccattcccatcggatggggccactccttacaggctaggaccagttcttgcccaactttgtctccccagtgccytaccctgagccggcacataggagggggtccagtgggtgtttgttgaatgactaagagaagtcattagtgatctgctctcccataggttcagatttcatactacggacccaagactmcaccagtcaaagctctactctacctcaccgsggtgggtaagtgacaaccaggatcctagagtgccgtctcatcccctgcccacctcctaatccctgcaggatgtctctgtaggagaaactacacctggagctyactttagactgagtagagaaaaagcatggtttctagccagtcagacatctgggagttcraaatattccatccttagtcagtgaaccacaaagaaayacaatgtggcagtggtggtgcggggaattttaattatatcttaacattttgcttctcaagttaggaagtaggaacttggattttcaatatatgcatctccattaattttttttttttttgagatggagtctcaccctgtcacccaggctggagtgcaatggcatgatctcggctcactgcaacctgcgtctcccaggttcaagcgatcctcctgcttcagcgtccctagtagctgggactacaggcgcttgccaccacgcctggctaatttttgtatttttagtagagatggagtttcaccatgttggccaggmtggtctcgaacttctgacctcaggtgatctgcctgcctcaggctcccaaagtgctcggattactggcatgaaccactgcgccaggccctctattcctttttgatacctcaaatatctmtaacaaaaagtagataatgacactgtcttatacaagaatatagatagtgttcctcaaattccattatttatatctcatcttcaccatttctgccatatcaatgatccacctatactcatatttatgtaatgttcttctttaaataaaatccattcttaaacttgacctcattttgaacaataatatcatgattagtatcattatgtgtattaaacatataagtagcagccagacatggtggctcacacctgcaatcccagcgctttggaaggcggaggcaggaggatcgcttgagcccaggagtttgagaccarcctgggcaacatagtgagatcctgtctctacaaaaaataaaaaaaaacagctgagcatggtggcatgtgcctgtagtcccagctactcaagaggctgatgtgggaggattgctcgagcccagaaggtcaagactacatgattgtgccactgcactccrgcctgggtgacagagtgagacccagtctcaaaaactaaaaaatatatatatacacacacatatatatataatatgtagcatatagaatcttcaggtttcatttcattaatgcatttcattcattaatgcatatttaagtaataatactacagcacttactcaattgccaggcactgtgctaagactttacatttaatccttacarcaatccagtgaaattggtattattattatcatcccattttacaggtgaggaaactgaggcacaagagctaaacagacttgtccaaggtcatgcaattggttagtgaaggagtcaggaagtccaggccaygaaaggacaatgcttccccggccctaactaagacgtggctatgaatatgtttagaaggtcayctgggtcagtctcatgtgggacaagggtcaccatatcatgctgtggggcacacggatctattttattggaatgaccttgcagtcatatattcggatgagggaggaaggatttacaaacaaatgtttgctttctcagccaagccatttggacagagtgggggcatgttcagggttgcaatttgtccccagatacagtcacaacacatgtcatgaagagcccgtggggctggtgtcaccgctgggtcccccaccccaaggtcactgagggctggggccagagtctttcgagaggctggcagggtgtgcctgcagaggcttcacatcgaacctctcattgtggtggttgggaattccttccaaaatccctgggggtggccagacgtgcagggtctggtggacatcacagttgtggccccgctgaaggggaacaggtgtggtcagaggccccagctctgctgtccgaactgtagccagacttcctgggggccgtggaggagggatgtcttgaacctgtgtctcctctgaaggacgggaagaggggctcmcactatgggtgcacacagtcccctggggaaacgacctgcccattcagggccaggctgggtgccccaaccccggaccctcaccaacctctcctcttacytgatgggatttcagaaatctccytgtgcgcagacatcacccgcaccggcaaagtgaagccaaccasagctgtgaaagatcaggtaccactcacccaaacgctcctttcctasttctactggaktctccccgggcgcccccttgtggtgatggggcaaatgctggyctgtcccacgtattccgtgttaactgttaaaaaaagaaagaaaattagcatcaccattaatattttggcttatgtatttcccatctattttacaaaatcagawtttcaccaattgtgggttcagatgtgttatcctacaaactggaaaccctactgagtcacccagttaatacacagcagagaggaaattcgtgggcaggtctcgactctggctcaaaaactccctactccatgctctacagctgatatgggagagatttctgcagagctgtctacatgggggaataacagagaaaggaagaaatggcagggggagaggcgggaaggagccaggtggggagagggagggtgtgttgtggaaagacaggatgatgggatgtgcagaaagggcaggtgaacgctgtcttaaaccagagtctgcaggtaaacctgaaaccccagagctgcctgcaccattttatgctggtgtgcactgggggctgtgccytgtaaaaagatgaagatcctttgtggggtcascaaaagtgggaagamaaattacaactctaggagtagaatctgtccctgtatccctcccgaaatgcagtcatttcccaggggcaracgctctcccgcgaagggaggcgccatcactattagatccctacagggtggggctgcttaatgtgctttaatctctaggcagatattaactggctgctaagaatagtaccacactttgctgaatgagtaattaagagttcacataatagtaactatttagattagaatattgacatacatatttagctgcatttggtttgtcaagctcaacattttatttatktatktatgtatttatgtatttatttatttatttatttattgagatggagtcatgctctgtctcccaggctggagtgcaggggcggttcaccgcaacctccgcctcccaggttcaagygattctcctacctcagcctcctgagtagctgcaattacaggtgcatgcctccacgcccagctaatttttgtatttttagtagagacagsgtttcgccatgttggccaggctggtcttgaactcctgacctcaggtgatctgcctgcctcagcctcccaaagtgctgggattacaggtgtgagccaccgcgcccagccaacatttcttaaaagctgttaaaatccatgtgactgtcttgggctcctttttttaaatggatgaattgtgttttgggtgaatttggttgtgacttttggagtaaaaggcaaaaatccactcctgagatcaaataattaattgatgtggaagcaagatgtgtaaactgcactgggttaaagaagtgatgggggccgggcrtggtggctcatgcctgtaatcccagcactttgggaggccgaggaggatggatcatgaggtcaagagattgagccatcctggccaacatggtgaaatcccrtctctactaaaaatacaaaaattagccaggtgtggtggcaygcgcctatagtaccagctactcaggaggctgaggcaggagaatcacttsaacctggggggtggaggttgcagtgagccaagatcacgccactgcactccagcctggcagcagagggagactccgtctcaaaaaaataataaataaataaataaattttaaaaaagaggtgatggggagttgctatgcctcttgcaagagttggagggctctatgctagtttctgagcatgactcttccctgctggtgtccagaggacctggacctggggcccttgtggacagggtgccatcctgctggtgaactgtgacagagacaatctcgaatcttctgccayggactgcgaggatgatgaagtgcttgacagcgaaggtaaagagcatttgctagctaacgggaagggctttttataaagcccttttgcccacatagcctgaacctggtgacggccctctgaaataagggttattgaaagcatcttcttgttggcaratctgttttataggtgaagcaatgggcaaaggccctcgggggkcaagtgacctccccaagctcacrcagcggtcagggaagagctgaggccagtgctgtctcctgatgcctcctacaggccctggtttccatgcctcaccctgctgcccaacctaaacgctcttaggtcaaacctggagcctgaaatccttcgaaatgaaagcttttcattcccaaactcatatcagagcagsccctgagacctctgccataggccgggcacgactctgaccactttggaatgattaactcatytgatcttccaacacaaacctttatagrtaggaaaaccaaggcacggggaacttaagcaatttgcccaagrtcacagcactgacacgtagcagactcggggtttgaaccccrgacgtcccaacaccggagcaggtttagaggcatgaggatggtggggaatgcaggatctctgcaggcaaacctctgggctgctaagggggtggctccggggttgaagtgaggaaacatyatccacctgcgctggaggaaggtgctaaggggctctggctggcaggccttcctggggagctcttagaataacatagaaatggatgtattttcaagttgcatgtagttrgcctggcccgatgccaggggacagcytctgtacagtgcctgacatgcggtaataatcacaacagctgtcctttgtgggcactcccggggtgccaagagctggtataagcactgtgtatcacctgactttatcttcacaaccattctacggtgggtacaactcttgcccctgtcttagtgatgaggaaacagaggcagagaaagctgaaatccgtttcctaagcccacccagatcccagattcaaaccaaattgaccgcaaagsctttaagcccttggctatcastcagtcccttgggaaccatctcttcactctccccaccctctaccccttcttggctattgttcaagttggttcacaaaccccacttcttgctcaggaccagcacagaaacctttcactcgttcattgcacaaatctcagccgagcgcctgccgcctgctggtcattgttctagggagttctcggctttctaggttcaagattcagggaacgttgcaaggagcaaaatattaataaatgtggtccccgctttgctgaggttacatccccagctcatcctagtgggaggagaccaaaaccttaatgagctctcattccaaamtgaaaaccatcatttaaatactcaaaatagcataaagaaaagaaaaccaggcaacatggtaaagggaggtctcaggggagcggtggggtgygaggctccaccaggaggtgaggtggctatgggaaaccagcagcrgtctcagggccctgtgactcaggcaatgcccttctcatcccagacctgcaggacatgtcgctgatgaccctgagcacgaagacccccaaggacttcttcacaaaccatacactggtgctccacgtggccaggtctgagatggacaaagtgagggtgtttcaggccacacgtaagtcatccccatctktgttcccctcctgccctggccaacggggcacaatcctgtcacacagctgtgtggcagataaatcctgagcacctactatgtgccaagttctaagaacagcagacgcagcagtgggcaagacagacracatctcgtctactaccttccagttggaggacacagacaaaatgactcgttattgytccctgcttttctttytctctctctcacacacgcgcrcrcacacacacacacacacacacacacctcctggttrtagactttgagtgcaagctgacagcatgtggcatgtaatcatttgttctgcaacatcctgctaatcagagacatcaggaacttctcagtgacccacgagcacctgcaactaagtaggtgccaggttgatyccaggcacggggcacagagccatgactgtgacygagtccctgccctcgtgttgctttcatcttagtggctgggagaactataggtaaaataattacataaaacacctagtgtgtccaacgctgtgacatgctatgtagaagaatgcggcagggaaggggatgtggagtgaggagtggagttcgggttgtgtggagagagggtggccagggaaggtgtcccccatgaggtgccatgtgagcagagggaggtataggaacagccagacagacacctaggggaagggcgttccaggcagagggaacggcaagtgcgtgggccctgaggtgagatcatgcctgtggtttggaggaatgcagggaggctagtgcagctggggcggaatgtgcaaggkttaaagtgggggatgagggtggaagagacagggcagaggggaagggggaggtcaggtaggcgtatattgactttggcttctggatggaaggagatggagagcgccatgggagggttttttttttgcatgggcctgacaatcattctgatcctgatcattctgcctggtctattccaagcttttttttttttttttwaatttttttttttgagagagtctcactctgttgccccrgctggagtgcagtggtgccatcttggctcactgcagcctccacctcctgggttccagagattctcctgtctcagcctccccagtagctgaggttacaagcatgtgccaccacatccagctaatttttgtatttttagtagagatgggatttcaccaggttggccagacaggtctcgaactcctgacctcaaatgatccacttgcctcagcctccccaagcactaggattacagacaccatgcccagcctctgtttcttttttttttttttttgagatggagtctctctctgtcgccaggctggagtgcagtggcgcaatctcaactcactgcaacctccacctcctgggttcaagcaattctcctgcctcagcctcccgagtagctgtgattataggcatccaccacaatgcctggctaatttttttgtgtttttagtagagatgggctttcaccatgttggccaggctggtctggatctcctgaccttgtgatcctcctgcctcggcctcccaaagtgctgggattacaggcgtaagccaccacacccggcctgtttcattcttaaagtgattaaactgacactgatttggtgacaggtcaacttattgcctccacccaggcatcacctcctccaggaagttctcagggattccctctatcacagctgtctgctattttcatgatctctgcttctccctactcacccgtaagactgtgcactctctgggggtgaggataggaggacagtgactctgtctccctggtcccctgctgtgcccctgtcccccgctgacatctggctagagcagatgctcaggaatgagtgaaggaatggtgtatactggacttcctataaagtttggaatagctcaggcacccctgccacacccttctgggacttcagccggggagcagcgtcccagctagracttcagtccttttctcctaaggggactggccagatttggctgcaaggggttctctgatggtgccatgtggtgaccctgggaaaggcttctggggagcactaaggagaggaggaaaagtcttcagaagtggggaygcagacctgagtctcccctgcctctctcctagggggcaaactgtcctccaagtgcagcgtagtcttgggtcccaagtggccctctcactacctgatggtcccyggtggaaagcacaacatggacttctacgtggaggccctcgctttcccggacaccracttccyggggctcattaccctcaccatctccctgctggacacgtycaacctggtaggccgagaaggcagccctgcatcgggggcctgggcttccaggcagtggcctggctagggaaaggggtacagagcccagctgggcagggggactccaaacagctgcaggaagtggtaggtgctgggccctggcagcggtgacagcccctccttccccttaccccctcccytgcaggagctccccgaggctgtggtgttccaagacagcgtggtcttccgcgtggcgccctggatcatgacccccaacacccagcccccgcaggaggtgtrcgcgtgcaggtgagaggtcctggggtgctggggtgggtccagacaacaaagagcctgarttccatccgcagcactcactgtgtgatgsgaaaaacagtcacccctcccctgcccactgagagcttgctgcttgttgggggctctaaaaaggcagggaagttccctactgttgttgtcattgcctctgtcctgccctgatgcagctgaggctacgttaactcccaggggcctgtagagtgtgtcccatggaccttgtgcaccagaaactcctgggaactcatttaaaatgcacctttctgggctgggcacggtggctcacgcctgtaatcctagcactttgggaggctgaggcaggtggatcacttaaggtcagaagtttgagatcagcccagccaacatggtgaaaccctgtctctactaaaaaatacaaaaattggccgggcgtggtggcgcatgcctgtaatccagctactcaggaggccgaggcacgagaattgcttgaaccctggaggcggaggttgcagtgagctgagattgcgccactgcgctccagcctgggcaacacagtgagactccatctcaaaaataaaataaccagcctggccaacatggtgaaaccccgtctctactaaaaatacaaaaaattagccaggtgttgtggcatgtgcctgtaatcccagctactcgggaggctgaggcaggagaatcacttgaacccaggaggccaaggttgcagtgagccgagattgcaccattgcactctagcctgggcgacagagcaagactccgtcttgagaaaattaaaaataataaaaattaaaaattaaattaaattaaattaaatttaaattaaataaaatgcacctttctggctgcctgtgagctgctgggtcttatccctgaggacggggcccatctgcattttggggaggcccaggcaatcttcctgcagtctgagagccgctgacaagtgtgctggggtctcaggagaccctctcctcccctcttctgatagcttcaggggcagaagagtaagagggtaatgtggtcaggacgcaggctggaatccagtgaggactgtattccggtcccagcactgttccaggtggtgtgaccttgaacagtgaactcatattctgtcttctcccaagttgatatggtttggctctgtgtctccacccaaatcttatcttgaattgtactcccacaattcccacgtgttctgggagggacctggtgggagataatttgaatcatggaggtggtttgccccataccattctcatggtagtgaataagtctcatgagatctgatggttttatcaggggtttccacttttgcatcttgctcattttctcttgccgccgccatgtaagaagtgccttttgcctcccaccatggygtccccagccatgtgggagtgtaagtccaattaaacctcttttccttcctagtctcaggtatgtttttatcagcagcgtgaaaatggactaatacagtaaattgataccagtagaggggggcgttgctgaaaagataccmaaaatgtggaagcaactttggaactgggtaacagacagaggttggaacggtttggagggctcagaggaagacaggaaaatgtgggaaagtttggaactttctagagacttgttgaatggctttgacaaaaatactgataatgatatgaacaatgaaatccagactgagatggtctcagatggagatgaggaacttgttgggaaccrgagcaaaggtgactcttgttatgttttagcaaagagactggtggcattttgtacctgccctagagatttgtggaactttgaacttgagagagatgatttagggtatctggcagaagaaatttctaagcagcaaggcattcaagaggtgacttgggtgctgttaaaggcatccagttttaaaagggaagcagagcataaaagttcagaaaagttgcagcctgacaatgcaatcgaaaagaaaatctcattttctgaggagaaattcaagccagctgcagaaatttgcataagtaacaaggagattaatgttaagccacaaggcaatgaggaaaatgtctccagggcatgtcagaggtcttcatggcagcccctcccgtcacaggcccagaggcctaggagaaaatggtttcgtaggccaggcccagggtccccatgctatgtgcagcctagggacttggtgccctgcatcccagctgctccagccatggctaaaaggggccagtgtagagctcaggctgtggcttcagagggtggaagccccaagccttggcagcttccacatggtgttgagcctgcaagtgcacagaagtcaagaattggggtttgggaacctctgccttgatttccaaagatgtgtggaaacgcctagatgcccaggcagaagtttgctgcaggggtggtgttctcatggaaaacctctgctacagcagtgcagaggggaaatgttggtttggagcccccacasagagtccctactgggacaccacgtagtggagttgtgagaagagggccactgtcctccagactccagaagggtagatccactgacagcttgcaccgtgtgcctggaaaagccacagacactcaacaccagcctgtgaaactggcctaccaggagggaggctataccctgcaaagccacaggggcagagctgcctaagaccatgggaacccacctcttgtgtcagcatgacctggatgtgagacctggagtcaaagatcattttggagctttaaaatttgactgccctgctggattttggacttgcatgggccctgtaacccccttgttttggccaatttctcccatttggaatggttgtatttacccaacacctgtacccccattgtatctaggaagtaactagcttgcttttgattttacaggctcataggaggaagggacttgccctgtctcagatgagattttggattgtgaacttttgggttaatgctgaaatgagttaagactttgggggactgttgggaaggcatgattggttttgaaatgtgaggatataggatttggaggggccaggggcaggatgatatgctttggttctgtgtccccacccaaatctcatcttgacatgtactcccataattcccaagtgttgtgggagggacccagtgggagataatttgaatcatggtggcagtttctcccatactgttctcatgatagtgaataagtctcatgagatctgatggttttatcaggtttttctcctttttcttcttcctcattttctcttgccaccgccatgtaagaagtgccttttgcctcccaccatggcctccccagccatgtggaactgtaagtccaattaaacctctttttcttcccagtctcaagtatgtctttatcagcagcgtgaaaacggactaatacacgggtggaaggggtacccactagttcctgcctcataacttgttagatggattccatgagctaatgcctgctaagagcagatggaccggacgtgccaggagcctctgttcaggccacaggtgacccctgagccacctgtgtgtccctcccaatccttccaggctgagcttcaaattccagagcactaaggagctgcttttctgctctctctagtatttttgaaaatgaggacttcctgaagtcagtgactactctggccatgaaagccaagtgcaagctgaccatctgccctgaggaggagaacatggatgaccagtggatgcaggtatgtgycctgcggggcaggcagggtgactgtccctgagggccaagagacacttgggggacccgggctcctggggttcagcctggtgcctcacyrgccactcttccttagatggacagggagataggaacctgagagatccttgggccgggaggctcaagcaagtgattcatctgacgtttgctgtgggccactgcaggcccactgcagtcaccaagatgaagccaccttcctgcttgaaaacactcaggtggcctcaggaaatgatgtgaagctcaggagattggtgctcaaccagcccctcaagtggtcctccctccaggctgtccatcttgggcccagccaccaaagcaggtcacaccccagctccagcactttccatggctcccatctcctcctgcttagtctgtttccaggccctctcagcctgcctggttcccttccctggggccagcctgccactgtgcytggaaacacatgattaccagtctctgtttccgtgccactcccccatcatgccaggagtgccccaaggactgagactgggcctcatccagcctagcaccctgaccctccccaccactgccttgctttgcctcgggaccctgtccttccatgccgcacycctgcggtgctgtctcttggacccatctccccattcccatcccccatctccaatccataccggtgaatcccagcacaaatgctcctcgtccataaatttcccccatcacccccagcaggaattcatccctctttcttttcacccccacacaacatcctttcttcctttcttgccattccatcttttcttttcttttttttttcactcttgttgcccaggctggagtgcaatggctcgatctcggctcatcacaacctctgcctcccgggttcaaatgattctcctgcctcagcctcctgagtagctgtaattacaggcatgtgccaccacgcctggctaattttgtatttttagtagagatggggtttctccgtgttggtcaggctggtctcgaactcctgacctcaggtgatccacccacctcagcctcccaaagtgctgggcttacaggcatgagttactgcacctggccgccattccatttttttgataccaagttgacctgtgtgaaattgctgatatgtgccatttttgatttgcaagagtggaactttcatctggttcatcctaatagtaacttatagtagtgattatgtccaacatcacacctgcctgctagaatacaagcctgcggaggcggaattttcagcagattcatttctgaaacctccccgtgctcctcctgctgctccagtggcccaggctgggtcttatctgccctcctttggggaggaggccgcgagctctggcgccaacaggtcttctctggcccatcctagctgcatcaggagcccctcctctgtgtccccacagacccctcaacccctcaccccccatcacctcctaacyctggtgcccactgcctggctcccttgttttctcaccttgaggaggggtctcagttttgctcaccaggggtccccagyactggcccaggcaccaccaggagtaggagggaagggyactcctgcaggctcatggcctctcgtgcactgggcaaacagggggcaataagctccgcttctgagccccttctctragatcaaacatcccataggaatgtgcccttgactgcaagggtgagagtgagtggatggtwtcatgccyccatcctggcgtcgggcaccaagacccaggcagcaygcgcaacagcctcctctccactcactcccacaggatgaaatggagatcggctacatccaagccccacacaaaacgctgcccgtggtcttcgactctccaaggaacagaggcctgaaggagtttcccatcaaacgmgtgatggtacctgcatggggtggggagggggcacagctgccgaaaccctcttgtcttgagactycctccttttagcctgccttccccgcccgcgcctgtagctgagtagcccagtgcaaggaggtggaattcctaccaaagtgggagcatgtaggtggggcttgttatttttttattaccaagataagatctggctcttcatttcccaaaacccttgtcacccgtgagctcagcttgatctccaggtaaccctgccgaggaggtggctcaggcttggacctccctgtgctcttgaagaagctcttgctgcaaggyggaggtggggccgggrctggaatctttcccaatgcccagctggaggctctgtcttatgggtggtgtttggtcttcaggggctccatctgggatatgggggattttgggatcagtggatcagtggtcatttcctgggtgtgactttatcagccacaggctgtccatgtggaggtgggaagtgacgtattgctgactcatgcttgactagcctggcaggttgatgcaaactcagcacagaacaataataataatagttgcatttattgagaatgagttgtgtgttagccagtgctgcattctttacctgcactgactcatttaatttgataaactgttatggagatwctatcaataggcccattttatagaagaagaaactgaggctcagagtggagaagttggaattcaaacccggccagtccggcttggtgagcatgcttttccccgccctgcctccctctccctgctttcccaggaagaccccaggcctgcgctctgagtcctggcagccccttggctcaaggtgcccagggaaaacgacggaaggagtgtggggtccaaggtttgctaggacaaatggctttccgacaagcatctgtactgtgccccaagggaggggagagtggccctgcccacacagaaggcttcagaatgaaacttcagttaaactcaacaacttgtcccgagtctcgcttcctcctggccaagctgtgcgctgagcagtggagatgcagagatgctgttggattcacagtgtgtactcagccatggggtcgagttcatcctgtttcagcagcrttggggcgaaccagccagctgctaccgtgactttgccctctttctgctgctttcagtcctgcctggttcagtggctgtgtctactttgatgctccaagtataacaaaggccagattttctgatgccacaagtcctgctggacagacagacggacacctcggcaccattgttgtcccctttcccacagacaactttggatgaaggcaggcagcactggtccctcagctaagcacatctgkgtattccaactcaaatcactcagaatgaggccaggtgtggtggctgacacctgtaatcccagcagtttgggaggccaaggaggatggatcacctgaggtcagaagttcgagaccagcctggccagcatggcgaaatcccgtctctactaaaaatacaaaaattagctgggcatggtggtgtgtgcctgtaatcctatcttctcaagagtttgaggcaggagaatcccttgaacccaggaggcagaggttgcagtgagccgagattgcaccactgcactccagcctgggtgacagagcaagactgtatcaaaaaaaaaaaaaagaaagaaaaagaaaaaacaacaacaaaaaacacccaaatcactcagaatgaagagaattggagaaaaagtcacactcagcaccaggctttggccccacctgcctctccagcaccattgtaggccactctcrctgtcccttacccagccccacctccactggcctccttcctgttcttcaaacttgcctaacgtttccccacctcacggtctttgcatatgccgttccctctgcttgcagtgctgttccctgttcacggggctggctgcttctcagccttcaggtttcagcttctatttcctactcagtgaggccttccctgatgctaaaagagggatccctactcccaccccaactcctagccttctccactacagccccctgttgacttcttcagtgtattttgttaaaatcatggwctcgttcatctacttttcgttgcctgcgctgctgggcctgaggctgttatgccttacgctgtccatcgggcagctggcacaaagcttcacacacagtggttgttcttcccgtaagcatcgtcagtaaattttctatcaccaccatcaatgggaaaccagcagcacttcctgcagatagaaggcaactgtgaagttaaacagaatgaaacaagatcctgctaccaaagccagctcgttacaagtgactgcagcatctctgagctcgaggtcagctctctgctggttaaaatgagggattagcaggtgtcaaggatgtgtttgcatcactgaaacttgaayttttgaggaaccagaaaagactggaggaaaatgagaagggcaacagctttccaacgttgtgcctcaggccrcatcacctggcatccatgagcgtcccccrcacagcccactcttggggggccacttctgcagactatggatatgccttcatttgcctgcagaaatccaaggctgaaggctgtataactgaccccctctcacaacaacagccagggcagtgatgtggmtgaatttacattcattcatcaaacactgtttgaacacatactcagcggggccttgttctaggcacttgagatatgacagggagcaacgccaaggtccctgacctcacggaggggacgttctggcccagagagacagacagcagacaatgaatagaacaaagcagttatatggttccttagaaggggatgtcaagagctacaggtgccaggtgtggtggctcatacctgtaatcctagcactttggaaggccaaggtgggagaattgtttgaacccaggagtttgagaccagactgggcaacataatgagaccttgtccctacaaaaaaaaaaaaaaaattgtttcaattaactaggcatggtaacacatgcctgyagtcccaactactagagaggctgaggtgggaggatcgcttgagcccaggaggtcaaggctgcagygagtcatgattgcacttctgcactccagtctgggtgacagatgagaccttgtcccagaggaaaaaaaaaaaaaaaaaaagagctacagggaaagacagagtagagcggaatggaggggctcataggtgccagcgtggtagggaaggtggattaggttacattcttaaagccgagtctggtggctcattccagtaatcccagcacttcaggaggccaaggctggtggattacttgagcccaggagttcgagaccagcctaggcaccatagtcaaaccctgtctctacaaaaaaaaaaaattaaaaataaaaataaaaataagccaggcatggtggtgcatgcctatagttccagctacttaggaggctgaggtggcaggacccttgaaccctgaagggtgaggctgcagtgagccatgatcacaccactgcattctggcatgggcaataggagtaagacctggtctcaaaaaaaaaaaaaaaaaaaaaagattgcgttcttaaataggatggtcagggtgggcttcacggagaagctgaccttgcagcagatgcttgagggaggtgagcgagttggccatgtgagtgggtgtctgggtgaagagtgttgtaggcagtgaaacagccagtgcaaaggccctggggcaggagcatgccttgagtgttccagaacagcaagagggcctggaggggtagagcagagcaaccaggaggagaggcagtcagagaggagataggaggtggtagaaaaggcagtcagggagctgatgggaggcagtaggagaggcggtcagggaggtgatgggaggtgggaggagaggcggccagggaggtgatgggaggagaggcagtcagggaggtgatgggaggagaggcggccagggaggtgatgggaggagaggcagtcagggaggtgatgggaggtgggaagagaggcagtcagggaggtgatgggaggtggtaggagagactgtggtcagagaggtgatgggaggcagtaggagaggcaatcagggaggtgatgagaggtggtaggagaggcggtcagggaggagatgggaggtggtaagaggggtggtcagggaagagatgggaggtggtagcagaggtggtcaaggaggtgatgggaggagayggggggcagtagaagaggctgtggtcagaggtgatggggaagggacgggatgaccggatggggttgggcttgttggctactgttaaggctgcttgtttagaaactgagaatcatcacagggtcttaaacagaggaggattatgatctggtttgttagaaaagggaacaagccctgctatgtgttgttgagtaaagagaacagaggcaaggggcaagggagtgggcaggtgagggatgctgggagtgcaggcagggtgtggccagaggaggtgagaagccatgagattccggctatgtctggaaggcagagccagcagggcattctgacccccgctatgagagaggcaagccaaagctgacagcaaggctgtgacctctgtgggtggcaggcaccatcccctgggaggggaggactgtgggaggaggaacagattgatggagaatgagggggtgggaagaggggacccaaagttctgtttagggcaagtgggagacaattggtcaacatccaaatgggaagtcaagtgagcgtggatacacatgtgatgtttgggagggaagggatgcccagagatgcgaacatgagggttgtcggctcgggaacggaattccatgagacttggcaggacgactgaaggggcaagtgaggttggaggtgaaccaggatcccccggtgtcctgaaagccaagtgcagaaagtgtgcggagaacacaggtgtgaccgcctgattcaggggcttctgaggggaaggcgaggcccgcgcattgcacttgggatatggccatgtgttcatggagacctggacaaggaaagctttgatgggcrggagaagcgggttggtctgggttttagagagaagtggagagaggaactggaagtgtgattgttaaatctgtgsaatcaggccaggcgcagtagctcacacctataatcccaacactctaggagccgaggcaggaagattgagcccaggagtttgagaccagcctgggcaacatagtgagaccccatctctacaggaaagaacaactttaaaaattagccaggttgtgatagcatgcacctgtggtcccagctactcrggcggctgagacgggaccgtgatcctttgagcccaggaggtcaaaactgcagtgaagaagtaaatttgragatcacagacctccttaagacccactcatcttcccagaaactcacacctgggcacayaatttggcgtctactctcagggagttcatggcccccatgaagcctcagggaatggaccatctatgtgtagaaggctagatgtaccctctcctgggaggcaggggagatgggcggtggactgaataatggcccctctacatcctagtccccccgaacctgatgtttccttatatggtaaaagggactttgctgaatgtaattatattagggwtcttgtgatggggtgattatcctggtttatcctggaatgcgggagggcctgtgatgatggaagcagagactggagatctttgaaggtggaagaaggggctgccagccaaggcggctattagaagctgaaaaagacayggaaatataatagattctttcctcagggcctccaggaggaaccagctctgccatccctggacttaagcccagtggaactgatttcacacttctggmctccagaattttaagagaataaatgtggctgggcgtgggggctcatgcctgtaatcccagcactttgggaggtcgaggcagatggatcacttgaggtcaggaatccgagactagactggccaacatggtgaaaccccatctctactaaaaaaaaaaaaaaatacaaaaattagctgggcgtggtggggcgtgcctgtagtcccagctactcaggaggctgaggagtattccttgaaccaggggcggaggttgcagtggctgagatcatgccacggccctccaacctgggcaacagagtgggactctgtcttaaggggaaaaaaaatgatgttttacagatttgttttatgcccaagttaaggtttaccaagcagctggcacgctttagggacccaacaaatgctagtcccttttcttgtccattgaatgaactcaacattcctttaaccttccacatgtgataacagcacctgctatgtgccagctgtagacggtactgagttacttcctgtgcccaagttcatctctaaacttggaccccccgacccttcaccagggacctcattcctctaactcttggcactcccttctcctatctcagggtccagattttggctatgtaactcgagggccccaaacagggggtatcagtggactggactcctttgggaacctggaagtgagccccccagtcacagtcaggggcaaggaatacccrctgggcaggattctcttcggggacagctgttatcccaggtaaggaggggagtaacaggaaggggtggccaggacccaggtatgccgtagaaaagcagaggccagagtggaagccttgccttcctgcttccgaytctagacagcccaacagacttgagggagtgtgagaggaatccaagcgcagggtgaggaatgcgggctttggagcccatagacccaagttcaattccagccctgccacttaccctctttcagtcagtgaatatttactgagcatccaraatgttctgggagctgggaatgcagccgtggacaagaaagacaagtccttaccactactctagtagggaaacagatgatagaaaagtagacaagataacttcaaatgacaaaaacaaaagagaggggcacgggaggaataggaactgttagggtgaccagggaggtcctctctggggaaggggcttttgaactgaggcctaatgacagaagggacagggccacctggagatctgggacagagagttcctggcaaatgaaagtgcatgtgcaaaggccctgaggcaggaatgagctcctgcgtgcaaggccaggatggctagaacctattgaacaagaagaggctgggcacagtggctcacacctgtaatcccagcactttgggaggccaaggcaggtggattacctgaggtcaggagttcragaccagcctgactaacatggcgaaaccccgtctctactaatgcaaaaattagctgggcctggtgatgcatgcctgtaatcccagctactcgggaggccgaggcaagagaatcgcttgatcccgggaggcggaggttgtagtgagccgagattgtgccagcctgggcaacagagcaagactctgtctcaaaaaaaaaaaaaaagtgaggaagaacaaggcactgcaacactaatttttttttttaggagaaaaytgaggctcaaacaggtgaaggaatgtccccaaggccacatggctaacaagagatcaccgacttaggtcagactggctctaagccccatgtgtacccagaataccagcatctcatctaactcaagaggcagtgctttctgaggctaagctctgttctacttaccttagtgactctgtgcctcagtttcccccaataaaactagaatgacaattccttgatttctcaaatgttaggggataaaataaaggcattctagactcctgcatccctttctcagctgaaggagaaccctgacctttttgycaagccccttgtccytcagggacttccctgtagcccttgctgccgataacacccctttaaccctgccatgacagcaatgacagccggcagatgcaccaggccctgcaggacttcctcagtgcccagcaggtgcaggcccctgtgaagctctattctgactggctgtccgtgggccacgtggacgagttcctgagctttgtgccagcacccgacaggaaggtacagtcttgggggctgcctcaggaagccatgcctccttcctgggtagaccctctgcctggggtgggagcaactttacttgtctatttctccttcacccttaggatggcagtagaggaggtggccagcttgggtccaagtccacactactcccaccctcagcagatccaccctcgttgggagctccaggggcaaagctgacttctaaccccagtgtttctgcctccagggcttccggctgctcctggccagccccaggtcctgctacaaactgttccaggagcagcagaatgagggccayggggaggccctgctgttcgaagggatcaagagtaagtcggccctgccttgttctcctgtctgtgcaccttcctgcttcccatagtccgctgttgcctggagggaatcatccaggcaayagggtagcatctgagcacctactgtgcgccaggcactgtgccaagtgctagggagactgcatgaacagggcagaacagcttgctgccctgtgggctcacaggccagggggaagtgrgtcaaaagaacagctccaacacaggggctttgaggggtgtctgagtggatggagctcagggaaggcttcttggaggaggcagaggccaagcagtagcatgcaagtaggggttggctgggcaaamggggcagggaaatgagaggaagagagataccacaggcagagggaygggggyggggcggctcagaggcaggagaaagcacgatgtgtgtgaggacctcggggaggttcggtatagctggagcacagatgaaatattactctctcagcagagctcacagacatgggccaggccccgggctgagatgcctctgtggctgagagctccacctcagatctgagtatgttgtgtggcatcaggagagggckgacctgtttcttcctctctcgatgggayctctttggagataagataatttagcgttaatgcaaggcaaaatgttccagtgaacaagtttcatggttcaactttataataattataagtaaacctgttaaatttttctggacattcttttcttttgaaacgaagttttcctctattgcccaggctggagtgcaatggcgcgatctcgactctctgcagcctctgcatcccgggttcaagtgattctcctgccccagccttccgagtagctgggattacaggtgtgcaccaccacacctggctaatgttttgtatttttagtagagatggggttttgccatgctggccaggctggtctcgaactcctgacctggtgatccacccacctcggcctcccaaagtgctggggttacaggcatgagccaccacgcctggcttaaaacaaggacatttcttattgacagcaactaaatggtacttgtagcatttttatcacacagtagattccatccattcactatacttttctgagctgtctgtcctgcatgcaagtagatatttttaatgttgtctgttttctgtgctgttcctgtaagtgtgctattaaaatacactaaactagtctgggcgcgatggttcatgcctgtaatcctagcactttgggaggacgaggcgggtggatcacgagttcaggagttcgaggccagctaggccaagatggtgaaaccccgtctctactaaaaatacaaaaattagccgggcgtggtggcgggtgcctgtaatcccagctacttgggaggctgaggcaggagaatcactcgaacccgggaggtggaggttgcagtgagccaagaatgtgccactgcactctagcctgggtgacagagcaagactcagtctcaaaaaaaaaaaaacaaaaaacaagaaaatattaaactaggctaagtgtggtggctcacacctgtaatcctagcactttgggaggctgaggcgggtggatcatctgaggtcaagagtttgagaccagcctggccaacgtgatgaaaccccgactttactaaaagtacaaaaattagctgggcgcagtggtgcgcacctgtaatcccagctactggggaggctgaggcaggagaatcgcttgaactcgggaggtggaggttgcagtgagtcaagatcgcactactgcactccagcctgggcgacagagcaaggctctgtctcaaaacaaaaaaaaaattacactataaaaatatattttaaaaagaatttaaatgaggtgagaacaacatttttaatgagaacttatactgctaaaatattgtattaaagacatttgacttgcagatgctcacagcaaacctgtatggtaagaattattactgactccattttatagatgggaacactgagtccccccccggcactggctgggaagagggaaatcgacctctaagttcatttgccttttttttctttttctccatgacagaaaaaaaacagcagaaaataaagaacattctgtcaaacaagacattgagagaacataattcatttgtggaggtaggagcctgggtgcctacaccccagcagacctgacgccctgtccccggctcagccactttmccagtgattagaggcacacagaggctcagggtctcaggatgcgctggaagacagagacacagaagcaagggcagaagcaaagactgggagaggctgagggagcagagggaatgggaggccccagggtcccccgagagcactggccagaggcccctctgtgcagtgaggcctggcagccaccttcactgccttcctgacactgtcccaggtcctaccctccggcagggggcctcagccccacactgtcccccacccccacccccgactgccatcagtcccccactcactgcccctgccccttccccaagagatgcatcgactggaaccgcgagctgctgaagcgggagctgggcctggccgagagtgacatcattgacatcccgcagctcttcaagctcaaagagttctctaaggcggaagcttttttccccaacatggtgaggaggtggcggctttaaaaccccagggtgtggcatggaggtagctcagcccgagaggccagtggggcacccgggcggtcccagagggcttggctcctctctgtaaccgtttgtagctttgtcctgagtggtacaaggtcagamgtgaccaggtccatgcacgttggtgtctttccacaaggtcaggcttctactgatgctatttccatcataaaatccacaagccacacggagttccccaggggcagtcctcaggtgggcagagccctgggcacacaggctcaagccactccacaagtcagtcagtcctgcaaaccatacatagtagtgtacttaatcaacacagaaatgttacagatgaaacattcttaccaaacaaagcaatatttaacatcaagagagaaggggataggaaaaggggtcagtgaaccagtccaaggagagtgatgtggacaaggagagggtcctgggctgatctaaatggacatcaacgtcttgcaaggaagagtgtaattttggcagagccttcaacagcgggtgccaggtgctaatcactagtgacagcaagacagtgtctgttaagacagtcatcttgaggccgggtgcggtggctcacgcctgtaatcctagcaccttagtaggccagagcgggtggatcacttgaggtcaggagttcgacaccagcctggctaacatggtgacacccccatctctactaaaaatacgaaaattagacaggtgtcctggcaggagcctgtaatcccaactacttgagaggcggaagcaggagaatcacttgaacctgggagacggaggttgcagtgagccaagatcatgctattgcactccagcctgggtaacagagtgagactttgtctcgggaaaaaaaaaaaaaaagacagtcatcttgagcwagtgaagacctgctctttttatagccagagtcctctggtgaggactgatagtaatagagtatgcctgcttatgtccctatctggttgggtgcagtctctgttgattaggcaaacatctggttcctgttagcatggtgccttttgaaatgtaagatggagtctttttctaagatggagtcacttatgccaagggtgctctatacaggyttgcatggccctgtaccacttccagagcaccttctggtatctcacaacaattccagaagtcagagtctatcgtcgcttctgccagggctctggcttcaaaccccatgccgtaactaccatgctgccttcccacstagcaccttccctggggctccggggtgatgcaggggatggagggatggatagggaatcaaccaacaaacacgacaccctcaagtcaccttatgcaccataacagggacacacgtgggggcaccacctcagactggagggtccgggaaggcctctgtgaggaggtggggctggcactgcctaggctgagtgggattcaccttctggaggctgcacttgtgggtggtcccacctttgtcttgagcgttcaccgtggcccctawgtgctgtcttgatatcatccattgtgtttttgccattccttggccccattcctccctctcttcagagcatacccgagaccgaggcagagacttcacccggtcctactggggaaccccagccacccccttcttctggagctgggggttacagttcagggaggagccagcaggccctaccaccgtggttttcaaactgggttcccactcagcctaggcagtgccagccccacctggggctccggggtggtgcctcaaatccagtggttcagattttctgtttctgcattgacattctgcaaaagattgtgtgtagaataaagggttccttggccaaaaggaattaaagtattgaccccaagcgttttgtttccctccagtttggccaagccaggcttcccagtgcgggaatgaaagtggacgcccgcrgctatggtagtcagcaacgctgagggctgactgtgtgccttcactgttcaaggtccccagagggagtctgagcatgagaccagactctctcccaggagctggctgtgggaggcggggaagagggagtgatgaacagtacgaggcacttagcacgcatgggctgtgtctaggcggtggcccccttgaggacycatgacccatggaaaatggctgtgcatctactgtgtgccagcacagtgctgtgcctacatgttcttacctaattgtcattgcaacggagatatgtgttgggctcattttgctgatgaggctcagaggggtgatatgacttgcctaaggccacacagctattgaatagcagagttaggattcaaacccacataggcctacagccaaaatcccaccttcccacctcaccaggccacctgccaatctaatggaggaagcagagtcatttacatacattatttacatatggaaagtgccataacagaggcagtcatttatctgtctagtcaacagatgtttattgagtgcctacgacgtgcaaggcgcagtgctgggagttatgggaacacagagcaggagtgactgccagagctcagggattcatgggcagtttcacagaggggctgccatctgagctgggccctgagtaatagaaagagtttaccagaaggtgacaggtaggggaggagaacgtagtgttaagagcatgggcagcatcagaaagaacgaaatcagccaggaggggtggctcatacctgtaatcccagcactttgggaggcttaggtgggaggattgcttgagtccaggagttcaagaccagcctgagcaacatggagaaactctgtctctacaaaaaacacaaaaattagccaggygtggtggcatctgctgaggcaggatgattgcttgagcccaggaggtggacactgcagtgagctgagatggcaccactgaactctagcctgggtgaagagtaagaccctgtctcaaaaaaaaaaaaaaaaaaaaaaattaaataatgtcctttgcagcaacctgatggagctggaggcattatcctaagtgaactaaaacagaaaatcaaatactgcatgttctcacgtataggtagaagctaaacagtggatacacatagacacagagatggaaataataggcactgaggacccccaaaatggagagaatgagagcgaggtgagggctggaaaattacctatcgggtacgatgttcattgtttgggtaatggatacactagaagcccagtgcccaccagtaatcaatatacccatgtaataaatatgcatatgtacccccaaatctaaatttttaaatttaaaataaataagagtatggaacttggagtctaatagctgtagtccaagtatagctgggtggccttaggcaaacaattttccacgtctgggtctcagttttctcatttgtaaagtggggctattatttttattttgttttaatttttgagacagagtctcgctctgtcacccaggctggagtgtattggaatgatctcggctcactgaaacctccacttcctgggttcaagcaattctcctgcctcagcctcccaagtagctgggattacaggcacacctggctcattcttgtatttttagtagagacggggtttcsccatgttggccaagctggtctcgagctcctgacctcaggtgatccactygcctaggcctcccaaagtgctgggattacaggcatgagccaccacacccagcaatttttatttttgaggtagagtctcgctctgtcgcccaagctgccaggctggagtgcagtggcacaatcacagctcactgcagccttgacctcctgggctcaagtgatcctcctccctcagcctscaaagtagctgggaccacaggcacgcaccaccatgccaagctaatttttaaaaatactttttttagagatggggtctcaccatgttgcccaggctggtctcaaactcttgggctcaagcgatcctcctgcctcagcctcccaaagtgctgggactacaggtctgagccaccacccctggaggggctattatttccaaaggtcagagaagggtggggcygctcagattgcgctgcaggctgcccgctgctgcctgtgacctgaaccctcacttccctgcaggtgaacatgctggtgctagggaagcacctgggcatccccaagcccttcgggcccgtcatcaacggccgctgctgcctrgaggagaaggtgtgttccctgctggagccactgggcctccagtgcaccttcatcaacgacttcttcacctaccacatcaggcatggggaggtgcactgcggcaccaacgtgcgcagaaagcccttctccttcaagtggtggaacatggtgccctgagcccatcttccctggcgtcctctccytcctggccagatgtcgctggrtcctctgcagtgtggcaagcaagagctcttgtgaatattgtggctccctgggggcggccagccctcccagcagtggcttgctttcttctcctgtgatgtcccagtttcccactctgaagatcccaacatggtcctagcactgcacactcagttctgctctaagaagctgcaataaagtttttttaagtcactttgtacatgaggtcaagatgttgttggtatcattcattcattcactcatttgtcatggttgaattgactatcacaaaacaaactgaaaagtgttaacaggctgcactgaaggccacgttattgtgtgtgtcttttgctcccagacatgtatttgggctataaaattttgcatgatcctagttcgttctgagtttcccacgggacctttccaagaagaggaggaggagggagcaggggaggggtaagccccgctgagaatctgggcatatccctctttaaactcacctacaactgggcattcacctacgtactgatagcgatggatttttgtggaatgaagtaattcatctcctcggtgttcttttttatattgccttttatggcttcgacataaagactcagattcctctgtagaaaataaaacttgatggcttgagatcattaaaattgagaccagatattggctcaaaagggtccaagatattcagagaacacccagggatcctgttattttcatgtaggtcatggagaatatatgatggcggaaaagatgaatatcaaaagcctctgccttcacacttcctgatttcaaaacatactacaagctacagtcatcaaaacagtgtggcatgctcataaagacaaatagacctatggaatagaatagaaagcctggaagtaaaccctcgagtataacatttctccaaagatgatatacaaatggccaacaagcacatgaagagatgcttaccatcactaaccatcagagaaatgcaaatcaaagccacagtgacctcacacccattagaatggttactataaaaaaaaagtgttggtgaggatgttgagaaattggaacccttgtgcactattggtgggattgtaaaatgaaatgatacaactgctatggaaaaaagtatagaggttcctaaaaataattagaaatacaactgatatatgatcctgcaatcccacttctgggtaaatatctgaaagcaagatctcctttttttttttttaagagggggtgttttaccatgttgcccaggctgatctcaaactcttaggctcaagcaatctgtccaccctggctatggaatattattcagccttaaaaaggaaggaaggaaggccaggcacggtggctcacacctgtaaccccagcatttggggaggccaaagtgggcaaatcgcttgagcccaccaatttgagaccagcctggacaacacagcaaagccttatctctacaaaaataaataaataaataaataaaattaaaaaaaaaagagttgggcatggtggtgcacacctatagtcctacctacttgggagacagacgtgggaggatcacctgagcctagggaggtcaaagctgcagtgagccatgattgtgccactgcactccagcctgggtgacagagtgagtgacccagtctcaaaaataaggaaggaaatcttgtcacatgttacaacatgaatatgctttgagcacgttacgctatgggaaataagccagttacaaaaagagaaatcctgtatgattccacttacatgagttacctagaaaaattcacaggaacagaaagtagaggctgggccaggtgactcacacctgtaatcccagcactttgggaatctgaggcaagtggatcacttgaggtcaggagtttgagaccagctttgtcaagatagtgaaaccccatctctactaaaaatatgaaaaattagccaggtgtggggtgcacatgcctgtaatctcagctactcaggaggctgaggcacatgaatcacttgagcctgggaggtggaggttgcagtgagccaagatcgccccactacactccagcctgggcaacagagcaagactctgtctcaaaaaaaaaaaaaaagtagaatggtggttgccaggtactggaggagcaagaagaagggagttgttgaatgggtgtagagtttcagatttgcaagatgtaaaagctggagatctgtttcacaacaatgtaaatatacttaacactgttgaactgtacacttaaaaatggttaagatgggccaggtacagtggctcacgcctgtaatcccagcactttgggaggccaaggcaggcagatcaccagaggttaggagtttgagaccagcctggccaacatggtgaaaccccgtctctactaaaagtacaaaaattagctgggcgtggtggcgtttgcctgtagtcccagctactcgggaggctgaggcacgagaatcgcttgaacccaggaggcggaggttgcagtgagccaatattgtaccactgcactccagcctgggcatagagtgagactctgtctctaaataaataaataaaaactgtatttttttttgaaaagcctctgccctgccccactaaggagaagtggatccataaaacctgggtcaaaatacactgctctgaagacaatcggctgctcccccagccccaaatgtactgaagcaaaggatgtgagtgtttctgtggaccagaaggggaccagggacagaggaagctggtatgagttgagccccaaacctggcagatagggctgcctcgagcagcgaacaggacttagcagataaaactgaagattttgctggattcctagggctggggaaggactcagagacaagctggtggataaggcacccctggcatcaggggacatgcagatgcgcagatgttaccccagccacgtatgggttgcaggtgggaggtgtctctggagaagtcagggaagcccacgggagagaaagtgctaccatccctctagagcacagagccatcccctgatcatgcccatcaaacaaaaacttccctgttcctttcgccttgctcccacctctcccttccccagagaccacataggagtttcctgaagctgctgttacaaatcatcacgaactaaaaggcttaaaacaatagagatggaccctctctcagttccagagaccaggagatcaaaatcagtctcactgggctgaaattcaggtatcagcagggccatcccagctccaaaggctttaggaggggagtttctcttctagcttctgccagctttcctcagctagtggctgcctcatgccaatctctgcctccctggtcacatggctttctcttctgtgtgtgtcaaatctccctctgcctcccccttataaggacacttgtgatgatatttggagcccatcggatagtccaggacaatcttcccatcccaagatcttcattcacctctgcaaacagactctttctttgtttctatatgagacaacctacaggttccgaagattaggacctgatctctcttgggtgccattattccacctactgtaggttggaaatcaccacgtgccagctgcagccagcagaataggaaagaaataagccaggcacctcctttcctttccgcagctctaagccttgcacctgcatcaagccctcataggaaagggtgaacattcccctttacaaaactgagtcttttgtgtgggagtcgactttcccactcccgaattgagagtgttttatgtctggttcctggaaacagattcttagatggagatttgcctgcaggaggtttatggggggtgccgggggagggtgtttccggaagcgcacctgggagggagtgtggggctcagagggggacactgaactgggatgcagttgcctcaaggcttcaggcaatgcacggggtatcttgggggctggggaagggcctcagagttgtcctgcattcagacaaggcaacctggcctttgtccccccacattggatgtggctgtccccagatggggacacaaccaggtactaggccgctcctaggcacagaaggcaattccagaagagagacttgcggcactcgcagcagctgggggcgtgagtgcctccccctaaaggggggcgcggtggcacaccacagcgcccaccacagtgacctcaagtgaccatgggacttctgatgagcaaacctgagttgagcatgatgagcaaacctgagttgccgagagagaacttctgcatggaataagcatgtgaggagtgcgggagtcaatacaaagttactttatgatcatgtaacccaagcaggtccagccaatgccagttggagagctcgagcccaaaaacaagagcaaaatatggtagaaggtgactttatttaccaaaactagcaatgggggagtggttggattcacatcaaaagcaaccgcttcgcctttctggggtgaaggcaagagtttaaaaagggaaactctggctgggcgcggtggctcacacctgtaatcccagcactttgagaggctgaggtgggcggatcacctgaggtcaggagtttgagaccagcctgaccaacatggtgaaaccccatctctactaaaaatacaaaaattagctgggcgtggtggtggacgcctgtaatcccagctacttgggaggttgaggcaggagaatcgcttgaacctggaagacagaggttgcagtgagccgagatggtgccactgcactccatcctaggcaacagagcaagactctgtctcaaaaaaaaaaaaaaaaaaaaaaaaagaaatttggtacaggaggtgtgcaggagttgtgaggagtacaaggtctgtgtcttgtttccatggctaactcgggtctcagtccccctaaagcacgggctgaagtcatttcagtaatgtgctgagttgttggctagctgcctggaggtaatctcttgaattctgcagctgggtctccaggctcggtctgtctcaagattagcccctggaacttcttttatcatcatcatcatcatcatttagagacagggtttcattatgttgcccaggctggtctcaaactcctgggctcaaggaatccttccgtctcagcctcccaaagctctgggattacaggcgtgagccatcacacctggcctggaacttgtaagcaagcatataattagatactagcatacagttagataaatgtgaaggggctttatggtgggaaagggagggacatggagtctattttagggttaagggaaaaggcttctgcagtttgctttaaggttacttcttgagactgaagagaaagggaaaaaaagttgtaaaatgcatttgaagttaagctgctcagttacaatcacaaacccctcggttcagtggagacacccctggaagcccattgggttattatctttattttattcatttatttttttttgagatagaatcttgctctgtcggccaggctggagtacagtggcattatctcggctcgctgcaaactccatctccccagctcaagcgattctcctgcctcagcctcctgagtagctgggattacaggcgtgagccaccacacctggctaatttttgtatttttagtagacgggtttcaccatgttgaccaggctgatctcaaactccggacctcaggtgatccacctgccttggcctcccaaagtgctgggattacaggcctgagccaccgtgcccggctgggttattatcttcttagggggaggacaaggaggtgatttagtcatttgctccacaataacttgttgagtacctactatgtctggagctgttttgcaggtgctggggattcagtggtgaataagaagmccctggaggcgagcaggacgtgctctgggtctgagtcactttcatctctgtccacgaggctgggtgaggagccttcctcactgtgctctgtagagccctggcacaaggcagggctgccccagggtggggaaygtcagagcttccaggctgccttcctccagaccccagagcctggactgggcctcagcgacccctccccagtcaacccgtcttctccctccagctgcctctggccgcttgtgcrtgagggtgggtgagccctttgggatgagtctcatcagagcctctgcacgcttagtgcttcctgcctgcttaattttgccactttcaatccaaccagaggggcattttgggtcttgctgaccaaccccctgc

SEQ ID NO: 95247 - DNA, 37989 bp, Homo sapiens
gtgaccgagatcacaccgctgcactccagtgtgagcaacagagtgagaccctgtctccacaaaacaaaaaagcaatgcaaaaaaggagaaagggggaaagtaaaagtggaagctcctccaaactcatcccgttgatagcttagacatttccttccacactctacgttattacagttatgcagcatatataaaactttctcccttcaaaagtaaggtaccatagagccaggagctgtggcgtgtgcccctaatccagctactcaggaggctggggtgggagcatcacgtgagcccaagaggtcggggctatggtttgccatgattgcgcctgtgaatagttactgcgctccagcctgggcaacatagtgagaccccattcctttaaaaaaaaaaaaaaaaaaaagcctggaacagtggcttctagcacttttgggaagccaaggtgggaggattgcttgaggccaggacttcaagatcaacctggccaacatagtgagaccctgtctcttttttttcttaacataccaaaaaagattttaaaaataaaggggtatcctatagtctgccagcagctattttttttttttttttgagacagagtcccaaaaaaaaaactgcactccgcctcccgggttcacgccattctcctgcctcagcctcccaagtagctgggcctacaggcgcccgccactatgcctggctaatttttttgtatttttagtagagacggggtttcaccgtgttagccaggatggtcttgatctcctgaactcgtcatccgcccgtctcagcctcccaaagtgctgggattacaggtgtgagccactgcgcccggcctctatttttacctcacaatgtagaagggatttcagtgctaataaagacctacctttttgttgttgttgttttgttgtgtgtttttttttttttttttttttttgagacagagtctcgctctgtcgtccaggctggagtgtggtggcgcgatctcggctcactgcaggctccgcctcctgggttcacgtcattctcctgcctcagcctccagagcagctgggactacaggggcccgccaccacgcccggctaattttttgtatttttagtagagatagggtttcaccgtgttagccaggatggtctcgatctcctgacctcgtgatccgcccgcctcggcctcccaaagtgctgggattacaggcatgagccaccgtgcccagccaagacctcccttatctgtgtgtgtgtgtatgtaaaaatttttggaactcctgcttaagagcactgtggcatgggtgtacccttatttaaccattcccctactaaggcacattcgggtggtccctattcaccttttcatccaaggctgcttttttaagtcgtagctggaaacctctggatcatccggaaaacaaaggtttcatgcatcctgaggcaagcagctgagaaaacgtgtgactcaccgagaatgagccttaatgagcattttctggcttaaagggctgattcaacaagcatctgtctcaggcattatggaaggtgaggtgctggggacaaggatgaacaagatttgttgcctgcctgccacctaggagccaaggtcacaaaggaaaaggaacaaacatcagaaatttcaagaacagggccgtgtgcccctccctacagcatcttggaattcttgactatctcagtgagacacacagtacttggccctgcggcgctgaagcctaagattgtggagtgcactggcttcttgaaagacagtggaacttgaactgcgggccatgtctgtggatagcttctgttccccagctcagacctaatggctttctatcagcctggggaaaggtcacattccttggattcatggataatttgacttggcttctaatctccagatctgtagggaaagatgggtttttctcatgaatgacttttttttttttttttttttttttttggagtctcgctctgtcaccaggctggagtgcagtggtgcaatcttggctcactgcaacttccgcctcccaagttcaagcgattctcctgcctcagcctcccaactagctggggttaacaggcgttacgcagctaatttttgtatttttagtagagacagggtttcaccatgtttgttgagcatactgatctctaactcaagcgatccacctgcctcgacctcccagagtgctgggattacaggtgtgggcaagcacaccctgcttctcatgaacaacttaatgctttgtaaagatgggtccgcaacaactgataagaggcagggtgtagcttaggagtcgccacttcagatcagcgtcatcagaggctgggttgactctgatggtcactctccgcagttgaactccaagttaaattggtatatgttatcaactgatagtttactgcttaatctttcattgaattggagacaaatgttctattgcaacagtcacaaaggcttttccagtaaaactgcagacctgtgtggggaacagtattttgtcctgtatgctacttctgtgcccagtgtgccttcatttacaagataatacttccagcctggccctgtggctcacgcctataatcctagcgctttgggaggtgggaggattgcttgagcccaggagttagaggctgccgtgaactaggatcgtgcctctgcactccagcctggatcacagagccagagcctgtctctaaagaaattaaaaataaaaatagaatttcgtaggactgaagccagccatcccttcttacctagctctggacatgttgaacatctgtgactctattttcctatctgtaaaatgggaattaacagcattcccctctcagaattatggttgaagtctaaaagtaaatgtgaaagcatcttgcctgcagtagagtaaatgctccataaactcaagtgaacggatttgtcttgagtacctactatgtgaaaggccctcgagtgaatgctgggaggctgcaagagtaattccttcccaaccctgagttgacagctggcatgtttctgacatgactggccagagctagaggcctccctgttgggaggatggtttttccgtgcaaggctaatattgcttatttctcatctctcccgtcacactgctcaggtcagggagggactcccattggtcaaattctcttcaggccccttcccttcctggcaccaggataactaccatacaaagtgctgaaactcggccaggcacagtggctcactcctgtaatcccactttgggagaccaaggtggatctctgaagcacaggagttcgagaccagcctgggtaacatggcaaaccccatctctacaaaaaaaaaaaacagaaaaattagctgggtgtggtagcgctcacctgtagtcccaggtacacagaaggctgaggtgggaggatcacttgagccgaggtgggaggatcacttgagcccaggaggtcgaggctgcagtgagctgagatcatgccactgtgctccaacctgggcagcagagagagaccctgtctcaaaacaaacaaacaaaaaaaacaaaaacaaaaactgaaaccccactttactgtgtgtctagacagccataatcctaccaacagggtttgttactaggtgaaaaaaatcctcttttgttgcaaaaatctagtgaaactagagaagtcgaaaagtaaagcaatgctctggaataaactcgcccaaattagtgatttctcaagctttttgccactgggaccaggcctattacgccctctccgtgggttcccaagagagccacagcctagaagggaagctgttcagtcggttctcacccacgtgggactggaaatttcagacacggttatccgggaagacagcctgggccacagacctcctcgatgaccacacaccgagagccacttccccaaaggtaaccccaagcagatggcaaggcctcccacatgctctgtggtttggaaggaagcttcctctggcctcctccctcattaaggagaagggacgagctgcaggtgcggctccttcccagctggctcagggaatagagcccctttaaggccaggcagccttagcaataaaaagaatgaagggggcacccttgcaaggcagtcccccatgcagtccccaagccctctgcttttatttatttatttatttatttatttatttatttatttatttattttagagggagtctcagtctttcacccagactggagtacctctgcttttatgaagccgctaatccagtgccaggatctaaagcaagcagctggcttctaccaagttcctgccatctcatttcatcctctccatgccttccattttgtaggtgaggggaaggagagccttagagaaggaaagtgacattttaaagctcacacagctagaaagcaactcatgcatccatgtctttctgatgccagaacccagccccttgccactgtaccatactgcctcttgccaaggccacctgggctagccatttccaaacccagccttcctgctgccctggaggctgggttcctgccagaaattgagctaagccctgggggaggacatgggagttctgaaaagttaagcagcctgcctcccctggaagtgtcaccggaagatgaaagaactcttgtcacctgacccaaggaagccagtcccatggcccaggtggtcaacaggaatgacccgcaactggttggctcgggcagcctgccccagctgagtaaatggctccactggcacccagctgctcaggccaaaaccctggggagcatcttgaattccacacattcctgcacccccacatcctatccaccagcaagtcctgccaacgtgtgttcctgtaccaaatgttcactgggatcttgctatgaatcaggtgctgctttccctcctggggtctatcccctacccacaccctcaccaccatcacagctgtgtctccttccagccccttccacaatagggatcgttggagttttcctttccttgactagggctacttcccagtagacagcagtctccgcagggacaggggcatctctgttttgttcactctcacgttcctggctcccacagtggtgctggcactccataaattcatactggacaaatgaccagtgatcctgcccacgtctatccttggccctaacgtgaaccttcccttgtttgccctaggatctcacagatccactctcccctttggagctcctctgtccagaggtcctggagacagggaacactatgcctgtgccggtcactatggggtagcaggataaatgctgcacgcaggtaagacatctctggtgcctttcaggggtcttcatgaatccccccagtgcaggtgtgtctgcaggtcacgctgtgaggcttctctttctctggcatttcaaggcctccagtgcatcatggcagactctccctgggtctctgtgggcccacatctgaccctgtgaatctctgggcaggtgtgtcttccttctttgcattcatcaagcagcgccaggcactgtctcaagtgcttgatacgcattttcttttttttttttttttgagacagagtttcgctctttttgcccatgctggagtgcaatggcatgatcccggctcacagcaacctccgcctcctgggttcaagcgattctcctggcttagtctccgagtagctgggattacaggcatgcgccaccacgcccagttgacaagcattttcttgtgtgatcctcgcagcagttctctgtgaagcaggcattgctatcctacaggttgggaaaagagggccagagaggatcagtgacttgctcacggtcgcgcggcctggaagacatggagagctggaccagcacgcacagtccctaaccactgggacgtgctggcgggggctacctccgtgaggtgtgtgtctccggtcgccccgcccccggtgtgtgcggaggagcaggcggggactacaagtcccggcagccccggcgcgggcgctgcgagggccgcagagggccgggcggggcttgcggcgcgcacggagggactgcggcagtgtcggagccgcgccgagcctggtggcccaggtgccccgcccgcgtcagccctgctccagccccgcgctagcccagcgcccctcgccccgggccgtccggaccgcgcccccgcccagggccttgcgcacgccggggcccaggccgagggccgcagcgccggggccggcgatgagcgcgaggagccggcatgagcgcaggtgagtgcggagtccgggtcggccccgagcccggcgcggtccccggcccgccagttgtcgtcaccccttggagggagaggggaggcgacgccccccaccgcggggtcgcgagcccaggaagcgggacctggttggggatcctggcccgtcccctcccttttgacggggactcggccccggtttcttcccagagacgccggggctggggatggcgccgccgctcgcagccggtccctcccctcccctgcacccctcagccgcgggattggaagccgggcgcttgtgcaagagggtcctggggccgtgcggggacggggaggccaccccacgcccacttaatcggatcccaccccgagtgacggatgtccaggtgggggagacggctgcatcctcgggcctctgggcaacccctctgggctgaatgaatgaatgaatggcgttgggggagtcgggactccatttcctgggtagatgtcctgggccacagcgccactcctgacctcctgcctcagaccccagagaaaacccgtcacacccagggccaagggccacaccctccatgcaacccatccctggccagatgtcctacgcccactcctccagggtctaatttaaatcccacctgccgggaatggggccagtcctcctcccctatccagaaaggtctcatctcagtgtctgtcactcagcccccagccccacagcctagagtgcaccccccggcgagggaggggaaggaatgaggaaagacagcccctagaatccagatccaaagatgggaagatggttcacacacactcccgcctcagcctggcagaagacaggagctcccygccgccgggaaccacagccagggaggaggcagccgccctgggccgctgccaggtcaccagcaggaagccaaggcttccgcaggaaataagaggtcccaaatggctctagcccctctgatccacagtgctggtgacactgccccgagctgtgacctcagacgaggttcaagtccagtcttggcccctcatagctgtgtgactttgtgcttgtcaatctactcctctgggcctcgttttaaatgggaatcctaatctgtacttttcatggaatggctgtgggaaagaatgtgcccattcagacacactcatttccagcttctcccctttcaagctctatgaccctggacaagggattcacatgctgttcctcagtttccccaggtgtacaatggggataataatagtcactaccccagagggttgtgtgtgaagcttcattgagttagcacactgaagggcttccgcagggcatggtgagcactccatgggagctgctgttcatcagaagagcaatgacaggccaggcgtggtggctcacgcctgtaatcccagcactttgggagcctgaggcaggcggattacttgaggtcaggagttcaagaccagtctggccaacatggggaaaccccgtctctactaaaaatacaaaaattagctgagtgtggtggcatgtgcctgtagtctcagctacttcaggaactgaggcaggagaattgcttgaacctgggaggtggagggtgcagtgagctgagatctctccactgcactccagcctgggagacgggcaggggggaaggggggaacggggggggaagactccatctcaaaaaaaagagcaatgccatsatgaaggtgctctcgcccccccamacagcctgtgggtgcctgttctgggctggtctgagcccacagaagccctggggagactgggctgtggctggggataaacagatgtactgcaggagagagtgccctgggcttgatccctgcagggaggggctctggaggtttccacagctgtgacttcctccctcaagttccactccccttttcctctttgccaaggttgactgagagagtgtcattgtgaagtgacagtcatacgattgccatgaggaagaacttcccagggggaccgctgtttacatactggggactctgccctctttttgaagaaccttttcttcataaagagtcttgaggccgggtgtggtggctcacacctgtaatcccagcactttgggaggctgaggtaggaggatcagcatgaggccgggagttcaagatcagcctgggcaacaaaatgagaccctgtccctactaaaaaaaaattagcctggtgcagtggcacctgcctgtagtgccagctacttgggaggcagaggcaagagtacctcctttagcctaggaggtcaaggctccagtgagctaggatcatgccactgtgctccagcctgggtgacagagtgagaccctgtctcttttaaaaaaaaaaaaaaaaaaaaaaaggaagaggctcaagcccctccccccaactcccagcacctttgccttcaagctctgttgtgtccaagagacagacattcattcattcagtcagtcggtcaatcagtgtttcctgacccctgagcacatggcaggtactgtgagcagtaagggcagtgacacccatctgagcctgatgctgaggggaatgtcaggagtagatgtgctgggcagagaggacctgggagtaaggccagccctgttccagctttgagacaagtctgagggcaactgccccagaggctcagtgctctcgtttgtcaaactgggtaagagagcccaccttgtgggttggtgcgggaggaaatcaaatcagcmccgcagggatggctcctttcccatcatccctgagcccgctgggctgttggcctgagggttttttttttttttttttgagtcttgctctgtcaccctggctggagtgcagtggcgtgatctcagctcactgcaagctccaccttctgggttcacaccattctcccgcctcagcctcccaagtagctgggactacaggcgcctgccaccacgcccggctaatttggtttttatatttttagtagagacagggtttcaccgtgttagccaggatggtctcagctagtctccacctcctgacctcgtgatccgccccccttgggctcccaaagggctgggattacaggcgtgagccactgcgcacggccggcctgagggttttaaggtacaaggagcaactgttgaatgggcctagggagccgtgggacagccagggcttcagacagggtgatgtgaaaggagaagagagcctgggaaatggataagcagaagccacgcccccctgacctgggagccgggtcctgcccacctgtccacgcaacccccccaggaacttcaaatgcttctacctccctgtgtgctggatgcttcgggactatcatcctagagatgagaaatggaagcccagagaggcaaaggcacttgctgtatgaaacacagcatcaaaaaagaaattcttaggaacaaatgatgggcaaaaagacaaaaccctgtctctacaaaaaaaattagctgggcatggtggcctgtgcctgtagtcccagctatttggaggctgaggtgggagaattgcttgagcctgggaggtcaaggctgcagtgagctatgatcgcaacactgcactccagcctgggtgacagagagagactgtctcaaaaaaagacttatacacgaaaactgtaagctgggcatggtggctcacgcctgtaatcccagcactttgggaagccgaggctacaagagtgataagtaaataaatgaatgaatgaatgaatgaaaggacatcacaaccgaggttacctggcagggttgatacgttagccatgtaccctgtgcacagtgagccctctaggagtgttgaagccagagtgcttggggatggggctgctcagaggctgggggtgctgtgcccacagcagctgcctggggcactctggactctttgggtagaaattttagaagggctcgccgggcgctgtggctcacgcctgtaatcccagcactttgggaggccgaggcgggcggatcacgaggtcgggagatcgagaccatcctggctaacacggtgaaaccccatctctactaaaaatacaaaaaattagccgggcgtggtggcgggcgcctgtagtcccagctacttgggaggctgaggcaggagaatggtgtgaacccggaaggcagagcttgcagtgagccgagatcgcgccactgcactccagcctgggtgacagagcgagactcgctctcaaaaaaaaaaaaaaaaaaggaaaaattttagaagggctcagattgggggatgaaggagggagcccagaaaatcagcagcctaccccgcacccgcccagcttttccagcttagtgagctttttcagaggctcttgtgaaaccacagatgcctagcaccatccctaccccggcctgaggagttgatccagccagtctggggagggccctggcatctgcatatgtaaaaggtgctccaggtggtctgggaccgtagatgaaccctgacagaggctgtccaagggtggggctggtgagctctacccgctctggagccccagaacatccactggctgcctgccctgctaaggccacagctctacagcacaggaggaaggagtgaaaagaatgtctgtggccgggcgcagtggctcagcctgtcagcccagcactcagggaggcaaggcgggtggatcacctgaggtcggcagtttgagaccaccctgaccagcatggtgaaaccccgtctctactgaaaatacaaaacttagctgggcgcctgtaatcccagctactcgggaggctgaggcaggataatcgcttgaacctgggaggcagaggttgtagtgagccgagatcatgccattgtattccagactgggcgacagagcaagacttcatctcaaaaaaaaaagaatatctgcaatagaaccacctgataccattccccaagtctcagtttacccatctgtaaagataggcctgcagggctgaccgtttattagtccagacttgactttgcatctcctcactgccagacctgggctgggcacgggcatggaatgaagataagcatccctgacccctgccctcagggtggggactggatgaggatagaaaagtgagacccagagctccaaggaagctaatggctggatgcacgagcaccatgggggcttggggcactgtccaggccccattctccaattctgggccatacccagcagaaagaccgacacacgcaaggaaacaagacactactggccaagcacggtggctcatgcctgtaatcccagcactttgggaggccaaagtgggcagatcacttgaggtcaggagttcgagaccagcctggccaacatggtgaaaccccatctctactaaaaatacaaaaattagctgggcatggtggtgcatgcctataatcccagctactcgggaggctgaggcaggagaatcgcttgaacctgggaggcaaaggttgcagtgagctgagatcaagtgactgcactccagcctgggtgacagagtgacactccgtctcaaaaaaaaaaaaaagatacggtaagtaagaaccgacggaaagaagagccagataaaggacacaggaagacatgagctttgggctctgtcagaccaggtgcttactgttttgtgttttgttttgtttagttttttgagatggagtctcactctgttgctcaggcaggggtgcagtggtgtgatcttgcctcactgcaacctctacctcccaggttcaagtgattcccctgcctcagcctcctgagtagctgagattacaggcacrcgctgccacgcccggctaattttttttatttttagtagagatgggtttcaccatgttagccaggttgatctcgaacttctaacctcaggtgatccacccgcctcggcctcccaaagtgctgggattacaggcgtgagccaccgcgcccaggctgatgtttattgtttttaaggaagcaagaggagaaggtgcctcccyaaatgacctttctcttttctgtccacagacagcagccctctcgtgggcagcacrcccaccggttatgggaccctgacgatagggacatcaatagatcccctcagctcctcagtttcatccgtggtaagtgggcagagtggggtggggaaaagctgcagggggtgaatgcccaggcccacccagacaccccaacttcctactccagycccgttcccaccccgacctgggccctctctcgctgcgttcgcagaggctcagcggctactgtggcagtccatggagggtcatcggctatcacgtcgtggtctggatgatggctgggatccctttgctgctcttccgttggaagcccctgtggggggtgcggctgcggctccggccctgcaacctggcccacgccgaaacactcgttatcgaaataagagacaaagaggtgagagtcaggctgagcctggggctagagaagcgcagtgagggtcagggtcgggggtggaggatgcttgggtgccaacccggccactgactttccatgggacattaggcaggtcccgctcttctctggacctcagctttcccatctgagcattgggcagaagggacgggtcgggtggtttctggagggctcyccatagccttgatttctgccttctccagcaggggccgcctggctgtaggacagggcctgggaggggaggggactcttctgagactgagtccatacctctgtgttccaggatagttcctggcagctcttcactgtccaggtgcagactgaggccatcggcgagggcaggtgaggcagccccattgccccttcccagaagcccctgctaccctggcctccccaacttccccaaccctcggcccccccataaaggctgactctggcgcctcccatcctagggagggaagatggctctgtgagcacagggaggtgccagggcagctcccagagctcgagagtaaccctcacctgcttccccagcctggagccgtccccacagtcccaggcagaggatggccggagccaggcggcagttggggcggtaccagagggtgcctggaaggatacggcccagctccacaagagcgaggaggcggtgagtgtcggacaggtgggttctgaaaaagtccttgcccctctctcggcctcggtttcatgatctgtgcaatgggagagtcagacttcatgttctcccaccaccttttagttctgttgtcccaaacatccaggatgctgtctgagcacgtttacactttcaggcctctccccacctctctgtctggtgacaccagtccctgccccctacccccatccctcggctcccagcataagcacactgcttctggggccggggccagcttccaacccatcctctcctctctcccacccagaagcgggtgctgcggtattacctcttccagggccagcgctatatctggatcgagacccagcaagccttctaccaggtcaggtaggagtcagggcctgtgtggctcatgtcacctcccagagtggcactggtttgggcacagacggtggcatggcatggcctgggctcccctctcagctctgatgcttttgctgtctgaaaccttgggcaggttactgagcccctccaggcctgggatctctgtctataaatagggcatgaagataacttctgcctcctaggattgttttgatggtgaaatagataataatttatgtagagcttggcaccgaatgtgatctgaggttgtgacaccactgtgaatcagactatcagctctgtactcagactgtctgcttggggtttagtcactgctctgccacctacaaaaggcttaagaaacatgagctcaggcygggtgcggtggctcacccctgtaatcccagcactttgggaagccaagacaggtggatcacgaggtcaggagttcaagatcagcctggccaagatgctgaaaccccatctctactaaaaacacaaaaattagctgggcgtgatggcatgtgcctgtaatcccagctacttgggaggctgaggcaggaaaatcgcttgaacctgggcggcagaggttgcagtgagccaacatcgcgccactgcactctagcctggatgacagagcatgactccatctcaaaaaaaaaaaaaaagaaaaagaaacacaagctcaccacacaccttagtttgtgtgtatgtgtgtgtgtgtgtgtgtgtgtgtgtgtgtgtgtgtggtttttttggtttgtttgtttgttttttaagatggagtttcactcttgttgcccgggctggagtgcaatgccgcattctcggctcactgcacctccgcctcctgggttcaagcgattctcctgcctcagcctcccgagtagttgggattacaggtgcatgccaccacacccagctaatttttgcatgttttgtagggacggggtttcaccatgttggccaggctgttctcaaatacctgacctcaggtgatccacccgcctcagcctcccaaagtgctagaattacaggcatgagccaccgggccctgctcacacactttagtttgaatgccgcagaagcagacccccagacaagggctcaagggcagggagtttgttttgaagctgatcccaggcagtgctggggaagggatggaagcacggagggaggttatgctggctgccacagctgtggacacccggacttcagtcgcctggggatctccttgggccagcgtagaccacacacctctgggcgacctcacacagggagtgaggacagttaccatcaaattccctgccattatcagtcacgggacacaaagtcttccacgctttccgggctcacaggcaggggattcacatgcagccagaaggcctcaggtaaagacaggtgttttcagggtccagctgtcatgtggaggtgaggcagaggggagatggggatggcagcaacagcctctgctgcatgatggggataatagcaaaaatcacccgtgcattcatcacttagcaagtggcaggcacgtccaaagcagtccccgaggcttgccccacttaatctacccatggccctatgtggtaggtgctgtcactgcccccattttgcagatgagaaaactgaggcacagagaggttaagtgacttgcccagggtatcatcagtgtaaatagtgcccttatcactaaataacagctactcttttcactgttcatattattagcatcatctctcgctgttctccttcttcagtgacttggtttggaacccagtgagaggaacaaaagggcaaagccaagccttgggttcaagggggcttacttgctcccaggagctcagtgtggcagaacggggatggggggcctagagcccatagtctccagcctgcacagggtgggggatgcagacctcaggccccatggcccatgcgtgtcccctcgcacccacccccagcctcctggaccatggccgctcttgtgacgacgtccaccgctcccgccatggcctcagcctccaggaccaaatggtgaggtcagtgctgccctggaccggggtgccctgagaactggggctccttgtgttgccccccartgtggttgccttccagtcacctgccttctctgggcctcagttcccccagctgaaagtggggagctccttcaccccgggagggtccagccacagctcctccttctgatggcttggcctcatcccctcttccaggaaggccatttacggccccaacgtgatcagcataccggtcaagtcctacccccagctgctggtggacgaggtagggctgtccctgggtcttgccccagccctgcctggcgtgctgtgtgaccttggcccagggcttgcctcctctgggccactttacggtggcaaccagaccagctgtccccttctccatagtggatcgtcatctcagaacctgccgcagtcagcctagccagagagaccaggtccaggaattggaggttctgcccaaggcttgggtcacagattggggccccactcrtagggattggaggccaagaggcaaatccacgcagcctgagcatctatggggtccccagagacacgccctagagcctgggtcctctctgtgcgtcctccactttcatgctcccaacagtcccgtgggttgggcctgggactgcactgttcacacctgagaaatccaagcttcagttggaggctgtgacatggccaaggtcacacagggacaaagagaagccagtgacctggacacaactagaataaagtgtgaacatcccagccctctgatcgggggcaggcaccatgaaagagatctttgagtctggccccatagaaatcagtctgtcacttagaagctatgtggttttttgttttttgtttgttgtttttttttttgagacagagttttgctcttgttgcccaggctggagtgcaatggcgtgatctcggctcactgcgatgtccacctcctgggttcaagtgattctcctgcctgagcctcctacatagctgggactacaggcgcctgccaccacgcccagctaatttttttttttttttgtatttttagtagatacggggattcactatgttggctaggctggtctcaaactcctgacctcagatgacccacctgcctcggccttgcaaagtgctgggattataggcatgagccaccgcacctggctggaactatgtggttttaggccagtggcttcacctgtccatgccttggtttcctcatctgtagaatggagctaatggtggtaccggccttgtagaattgtcattgccattgtatgacacttagataaagcacttggcgtgtagtgggggttcagtaaatacccttatcctatttatttatttgtttattttttttgagacagrgtctccctctgtcactcaggctggagtgcagtggcgcgatctcagctcactgcaccctccacctccccagcttaagtgatcctcccacctcagcctcctgagtagctgggagcgtaggcacaggccaccccatcaggctaatttttgtattttttgtagatatggggtttcgccatgttgcccaggctggtcataaacccttgtcctctttagagcggagaaactgagggccctggggatgtctggttgggtggggatgggattgaccaggagaaaggcctggctccagtcctttggcagccactgggccctctgctcccatgggcacaggagacccagcctgtggctgggctgccctgggggacgcggccctgacgctgcctcccgcccctcccccaggcactgaacccctactatgggttccaggccttcagcatcgcgctgtggctggctgaccactactactggtacgccctgtgcatcttcctcatttcctccatctccatctgcctgtcgctgtacaagaccagaaaggtgagtgccataaggtgggtggggacgggacaggtgggtccccaggggcccccacccactcacggccctcttgtcccctgcccacagcaaagccagactctaagggacatggtcaagttgtccatgcgggtgtgcgtgtgccggccagggggaggtgaggagctagggcccagggggcgggggcaggagtgggagggtgggggggcatggctggggctggccccacctagctgagctcctctcctgcctgcctgcagaggaagagtgggtggactccagtgagctagtgcccggagactgcctggtgctgccccaggagggtgggctgatgccctgtgatgccgccctggtggccggcgagtgcatggtgaatgagagctctctgacaggtgagcccccagcccctggcctgcagcttccttcctcccctgccatccaaccctttgccctgcggcaaaagttttcatttgagtttccttttccttttttgtttttttgtgagacggagtttcactctgttgtccaggctggagtgcagtgacatgatctcagctcactgcagcctccaccccccaggttcaagtgattcttgtgcctcagcctcctgagtagctgggaccacaggtgcataccatcacgcccagctaattttttatttttagtagagatggagtttcactatgttgcccaggctggtcttgaactcctgacctcaggttatctacccacctcggcctcccaaggtgctgggatttcaggcgtgagccagcgctccgcctcctcttcctttttctctcaagcaacaatcccagctttaggacttgctaacctcacacccctgggccgttaccacgtatcatctccgtgcctcagttccttcttctgtaagatggctgtcagtcactcctcctggacagagttgtgcaaagtgcttaggagcgtgagaggtgcagcataaatggccagccacccagtgcatctgggctatttctccttttttttttttttttttttttttgagatggagtttcactcttgttgccccggctggagtaccatggtgcgatctcagctcactgcaacctccacctcctgggttcaagcgattctcctgccttagccacccaagtacctgggattacaggtgtgcgccaccatacccggctaattttgtatttttagttgagatggggtttcaccacgttggtcagactggtcttgaactcctgacctcaagtgatctgcccgccccagcctcccaaagtgctgggattacaagcatgaaccatagcacctggctgcatctgagctgtttctataccagtgcccaccttcaggtcataaagattccagatggcacaggagagtgggaagccctctcccagagtgagagactgcggtccccattcactaccccacagtccccttcccttcccctccccagggcagccactgtgaagggtgtgaggtgtcttccacgcctttttctgcattacgtgtgtgcacatgggctgatttgcctctccttttgttctgaacgtgggattgtatgctgtgtattgttccatactttgctttttctcctggcatccttccacaagcacggatggccccacctcatggctgcatgagagtccacaatacggatgtatcgtaactgactcaaccggcccgctcgccatgagtatttagaatgtgattttccagccattgcaaaggacgccacaggagcagctttgtcctgtgtctcttgatgtgtgcaagtatttctttctctgagatgtgttatattttggtggtagatactggagagagtttactaaaaaccacaggatagtggtttttttccagggaagttttctggctggcattgtatttgtatcacaaatcgtaggccaggcgcagtggctcgcacctgtaatcccaacactttggcaggcagaggtgggtggattgcctgaggtgaggagttcgaaaacagcctggaaatcatgttgaaaccccatctctaccaaaaatacaaaaaattagccaggtgtagtggtgcacgtctatcgtcccaggtacttgggaggctgaggtgggaggatcgtttgagcctaggaggtggaggttgcagtgagccgagatcgcaccactgcactccagcctgggtgacagagtaagactccgtctcagaaaacaaaaaaaaagtagtaattgtgatcagtatgatttgtgggcacacgccctgagccctgccctccacaaactgtccacacatacttcatctgctcatctcttgtgaggcagacatggcaggattgtctgactcccttgcaggaatgtgcacacagtaggtgctcaatagtcccagcctgcaggcattcagtaagggagtgccactgtttgctaggcagcctgcccaggacttcacagggccatggcgagcatgcagtgcttttctcactccaactcatggaaatatttgccccctccatgtaaatatttctctcccctccccctcctccttccccctccccttccttaccccatcccctcccctcccctcctcttttgagacagagtttcactctgttgtccaggctggagtgcagtggcacgatctcggctcactgcaacctccgcctctctggttcaagttattaccctgccttagcctcccaagtagctgggattacagatgcccaccacaacacccggctaatttttgtattttagtagagacagggtttcaccatgttggccagcctggtcccgaactcctggcctcaagtgatctgcccacctcagcctcccaaagtgttgggattacaggcgtgagccaccgcatctggccccttgtaaatatttctgttggttggagttagaaaagcactccatgcatgttataaaataattccagcagaaagagaacgactcccccaccctgccccactgcacacatgatgcccacacatgctctgtctgacccaccccccsccgctggttccagggagctggctgccacctgcttccaggagtgtctccctgtgcctttatatctccgtcctctctgagcctcagtgttcctctctgtaaaatggggctgtgatttcttgttcacacctggttacagagttaactgagacttagagcttgtgggacaattctacacagaactcctggtttgctggtgggagggaggggtgtggagtggtcctcacaccacgttccccaccaggagagagcattccagtgctgaagacggcactgccggaggggctggggccctactgtgcagagacacaccggcggcacacactcttctgcgggaccctcatcttgcaggcccgggcctatgtgggaccgcacgtcctggcagtggtgacccgcacaggtatgagccgggaggctgggcttgagagagatcccgggctcagcacccttgggagaggtggagtgrggcagggtgggacctggaaccctggaccccacgcccacctctgctgctgccctgctgtgggacctcgggccagttgccccccatctggggtctgagcattcccatcttagcagaagttgggccagactaaggccaagcattgcaagatctggaggagccgccggggttacagtgctggagcgggcagggatgtagcgggcaggcaggagccttccctgtgtctggattttcagtggaaccacccagtgttwagatgctatccactagttccttgtttaaagcccttaaaaagcctacaagagccgggccagacctgttaggactccacactgctgatggctaatttcacaaacatcatgtcttgcaactccagaggcacgggtcgggagggctaggggtggggaaggcctgccctcaccctggcttccctgccttggggtccccgcctcctccccagggttctgcacggcaaaagggggcctggtgagctccatcttgcacccccggcccatcaacttcaagttctataaacacagcatgaagtttgtggctgccctctctgtcctgggtgagtggccccctgcaccctcctctgcccatagccccccccacctgggtcccaaatcccactcagtccttcgctgtccccacagctctcctcggcaccatctacagcatcttcatcctctaccgaaaccgggtaagccttgggggtggggtggggggtgctgccagcagggcccaggggccaaccagccaggtgctcacattcatggtgccccctgccaggtgcctctgaatgagattgtaatccgggctctcgacctggtgaccgtggtggtgccacctgccctgcctgctgccatgactgtgtgcacgctctacgcccagagccgactgcggagacagggcattttctgcatccacccactgcgcatcaacctggggggcaagctgcagctggtgtgtttcgacaaggtggggccgcaggtggggttggtgcaggggagcgggacagccacaggcgccccagtgaggcctccacacccgcgttattctctcagcagcacccacaggatgccaggtcctgtctagggatggaaacccccagaggatccaccccatcccactcctgccctcactgggctcacggtctggcagatgaaatgtctagaatcatgtattcatgtgttcaagaactggtggggggccgggcgcggtggctcacgtctgtaatcccagcactttgggaggctgaggcagatacatcacttgaggtcaggagttcaagaccagcctgaccaacatggcaaaaccccgtctactaaaaatacaaaagttagccaggcatgatggcacatgcttgtaatcccagctactcgggaggctgaggcaggagaatcgcagaggttgcagtgagccaagatcatgccattgtactccagcctgggtgacagagcaaaactcaaaaaaaaaaaaaaattactggtggggacctggggccctagtgtgcatcccgtgctgctcccaacccttggggcccagcagtgaccaacacaggcatccttgtggtcactggagtgtgtgtgtcccccaccaaagtaagtgatccaggagtgcacaaaggagctgctggggctgaggagtgggcagtgggttttaggaaggaagccagtgggatagcttgatgggttctagatggggacacttccttagagagaaggcagtcaaggaagccccctgagcaggtccctcagtgacctcagtgaggggcaggtcgaggagaagcaagggtaaaaggtgggagtgtcatagcacagatgtaccgtgtgcctggggcacagggagtggcgtggcacagatgtgctgcgtacctgagcacagggagtggtggagcaggacagggccgggtaggcagtggcctggttgacagaggctaggtgacattcagaggctgtcgggggccacagagcgcttttaaactggggagggggcccagcgcagtggctcatgcctggaatcccggcacttcgggaggccgaggcgggtggatcatgaggtcaggagttcaagaccagcctggccaatatggtgaaaccccgtctctactgaaaatataaaaaattagccaggcacggtgacatatgcctgttgtcccagttactcgggaggctggggcaggagaatcgcttgaacccgggaggcagaggttgcagtgagctgagatcacaccactgcactccagcctgggcaacagagtgagactccgtctcaaaaaaaaataaataaaccggggagggggatgaccagattcttatagttcccaggctagccaaggagccagacgcgtacttgggcagttagagtctaggatggggaacgcaggcactgactcatgcgctcattcaacagatatattgaggctgggcgtggtggctcatgcctgtaatcccagcactctgggaggccaaggcgggtggattgcctgaggtcgggagttcgagaccagcctgaccaacatggtgaaaccccgtctctactaaaaatacaaaaattaggtgggcgaggtagcgcgtgcctataatcctagctgctcgggaggctgaggcaggagaatcacttgaacccgggaggtggaggttgcagtgaactgagattgcgccactgcactccagcgcgggcgacagagcaagactccatctcaaaaaataaaaataaataaaaataaaaataaataaataaataaataaataaatgagagagagagagcgagccaaccgtgggccgggtccttaaccacaatgcacaagtgtggggaagtgaagaggccatgggtaggagcccagagcaaaccacctgccctaacttgggagttaaggaggaagacaccctggaagagatgatgctagacagagagacggtgggggctggggagggggaccccagcagagggaatcacatgtgccaaggacagcagtcaagaaaggtcatcttttggctccagctcgagttcctggggttcccatagggtccgccgggcctggggtttggaggcccagctcagcagggtacccccatcccaggactcatcgctgccccacccacctgtctcccacagacgggcaccctcactgaggacggcttagacgtgatgggggtggtgcccctgaaggggcaggcattcctgcccctkgtcccagagcctcgccgcctgcctgtggggcccctgctccgagcactggccacctgccatgccctcagccggctccaggacacccccgtgggcgaccccatggacttgaagatggtggagtctactggctgggtgaggaggccaagcaggtcagccccctgcctctgggcagtggggcctaacgaatcccaccctgtcttccctctccatctttcagggtggtctcttattatgcccaccattaataataataggccaggcgcagtggctcacacctgtaacgtggctcccggcgctttgggaggccaagacgggaggatcacttgagcccgggaccccagcctgacctacatggcaaaaccccatctctgccaaaaatacaaaaattagccgggcgtggtggtgcatgcctgtagtcccaggaggctgaggtgggaggattaattgagcccgggagggcgaggctacagggagctgtgatcacgctactgcactccagcctgggtaacagaacgagaccctgtctcaaaaaataataatgataggccaggtgcagtgactcatgcctgtaattccagcactttgggaggctgaggtgggcagatcacctgaggtcggaagtttgaaagcagcctggccaacatagtgaaaccccgtctgtaataaaaatacaaaaattagccaagtgcggtggaacatgcctgtagtcccagctacttgggaggctgagggcaggagaatcatttgaatccgggaggcagaggttgcagtaagccgagatcacaccactgcactccagcctaggtcacagagtaagactctgtcttaaaataaaagtaacataataataatggcaaggcctcaggctgagtgcctactatgcgccagcgcacggccacagaggcctggtctcatttcctcttccccaagccctagcaagcaagctcaaatgttgcttcacggatgctraggctgggagatttggagtgacgtattccaggtcacccaacagcttgtaagtagcaaagctagagtttgaatttgagtccaccgggctccaaagcccacattcttaacccaccattcagtctcccatgaaggaagtcttccctgagtctagctcaaatctctctgtgagccaaagcccccagacaccaaacttccctgcctgcctgccaggtcctggaggaagagccggctgcagactcagcatttgggacccaggtcttggcagtgatgagaccyccactttgggagccccagctgcaggcaatggtgagctgaggggggcctgttgggtgcagggcagaggggtgggctccccagccagcacctcagctgcctctccaaccctgcaggaggagcccccggtgccagtcagcgtcctccaccgcttccccttctcttcggctctgcagcgcatgagtgtggtggtggcgtggccaggggccactcagcccgaggcctacgtcaaaggctccccggagctggtggcagggctctgcaaccccgagacaggtgcagggggaagcccctgagtccccctggttgggcattggcacagaatggggtgggtacccagcctctgtccctgccatcccctccttgtgacacctgcctctccctggcagtgcccaccgacttcgcccagatgctgcagagctatacagctgctggctaccgtgtcgtggccctggccagcaagccactgcccactgygcccagcctggaggcagcccagcaactgacgaggtgggcctgtctcctgtcccacccactctgaggactaggcagagggaggctctcacgcaggcagagcccaaggaagatgccctgcctggtggctgggagaggggccctggccactgcatgacctctgatccaggtctgcccaccctccagggacactgtggaaggagacctgagcctcctgggkctgctggtcatgaggaacctactgaagccgcagacaacgccagttatccaggctctgcgaaggacccgcatccgcgccgtcatggtgacaggtacaatggcatgtaggggcccgggctagcarggcagaatccgccccttcctggcagagaagaggggcaccagggattcctttttggggcatctttttgggcccttgcttcaggccaggtcctttttaaacatttcgtgaatcttcacaatatcccccccgcargtggtaattgtcacccctgtttgacagatgaggaaactgagactcagaggagtggagtgacttccaaggaacccatgtgcgctgtcagacagcctgggttccaggtggcacctctgagaaatggggataatgatgtcagcctcagaggctgtgacaagctcaaggagcaggaagagaaagattctggccgggcacggtacttcatgcctgtaatcccagcactttgggaggccaaaggagaaggatgtcttgaaccctggagttcaagaccaacctgggcaacatggcaaaactccgtctctacaaagaatacgaaaatggccgggcacagtgtctcacgcctgtaatcccagcactttgggaggccgacgcgggcggatcacttgaggtcaggagttcgagaccaacctggccaacatagtgaaaccccgtctctactaaaaatacaaaaaattagccaggtatggtggtggatgcctgtaatcccagctactcgggaggctgaggcaggagaatcacttcaacccgggaggtggaggttgcagtgagctgagatcacgccatttcactccagcctgggcaacagagagagacccagtctcaaaaaaaaaaagattctagctagggtgagacagcaggagctaagaggtctgtgtccttgtcctccccgcccctgcacacacacatatgtgcacacacattcatgggcacttggcagcagagtcacacagcagtaaggagtatatgtagcctgggcacatggctcgtgcctgtaatcccagcactccgggaggccgaggcagggggatcacctgaggccaggagttcaagaccagactggccaacatggtgaaaccccatctctactaaaaatgcaaaaaaaattagcctggtgtggtcgcaccctcctgtaatcccagctactcaagaggctgaggcaggagaattgcttgagcccaggaggaaggaggttgcagtgagccgagatcaagccactgcactccagcctgggccacagagagagactcttgtcttaaaaaaagaaaaaaaaggagtatatgtggagctccagcccacggctccaggttctcctaagacccttcaatgcctggatctacagatgagaaaactgaggcaaagggatgttggtaacctgcctcagctcacttggctggtggtggcagacggatttcatccagcctrttttcccatctgtaaggatcaggatgaggatggcctccccggatagcctcagaccctcaccttgccccataacccccaggggacaacctgcagacagcggtgactgtggcccggggctgtggcatggtggccccccaggagcatctgatcatcgtccacgccacccaccctgagcggggtcagcctgcctctctcgagttcctgccgatggagtcccccacagccgtgaatggcgttaaggtgaggctaacccagagttccagctgtacctcacccagtgacccmacccctgtgtcacctgacccaggccccaactctccagggtgggcagggggagctaagctgagcttcctgggcccccaggatcctgaccaggctgcaagctacaccgtggagccagacccccgatccaggcacctggccctcagcgggcccacctttggtatcattgtgaagcacttccccaagctgctgcccaaggtagggccgcccccagctccctggccgccctgcgcctcccctgctctgtctccttcctcacggctcgctctccctggtgggtgcctcagccctcccccatctccctgtgctcccaggtcctggtccagggcactgtctttgcccgcatggcccctgagcagaagacagagctggtgtgcgagctacagaagcttcagtgagtgctcggcagagggtgtgggcaagggcctgcggagactgagcttgtccgttcgtctgttcatctgtccttccccagggccctgtctccctcctcaggcaccagagagctgtcacccctcctcaccaaaagcaggcaggctctcccaggtctttcatgctaaaaataataattgtaggctgggtgcggtggctcattcctgtaatcccacctctttgagtggccgaggtgggaggatcacttgagcccaggagtttgaggccagcctgggcaacaaagtgagaccccatctcttattaaaaatttaaaaattagccaggtgtggtgacacaccggtcatcccagctactcaagaggctgaggcaggagggttgcttgagcctgggaggctgcggctgcagtgagccatgatcacaccactgcacttcagcctgggcaacagagcgagactccgtctcaaaaaatagtaataggccaggcgcggtggctcatgccagtaatcccagcgctttgggaggctgaggcaggcagatcacctgaggtcaggagttcaagaccagcctggccaacatggtgaaaccctgtctctactaaaaatacaaaaattagttgggcatggtggcgcacaccagtaatcccagctactcaagaggctgagggcacttgggcagcagaggaggttgtagtgagcagagatcacgccactgcactctagcctgggcaacagagggagactctgtctcaaaaaataataggcygggcacggtggctcatgcctgtaatcccagcactttgggaggccgaggcgggtggatcacctgagatcaggagtttaagaccagcctggccaacatggtgaaaccccatctctactaaaaatacaaaaaattagccaggcgtggtggcgggcgtctgtaatcccagctacttgggaggctgaagcaggagaatcacttgagcccaggaggcagaggttgcagtgagctgagatcatgccattacactccagcctgggcaacaagagtgaaactccgtctcaaaaaataataataataatgataataataataataattgcatctattcactgagcgcctcctgtacaccaggcaccatgtggcattaggggcccagctgtcatcatattctgccagcccacccatggggtggtggggtaattccccaggccacacctgtccacacctctcttcaggtactgcgtgggcatgtgcggagacggygccaatgactgtggggccctgaaggcggctgatgtcggcatctcgctgtcccaggcagaagcctcagtggtctcacccttcacctcgagcatggccagtattgagtgcgtgcccatggtcatcaggtaaggcaggcagggaccggtgggtgagggctcagcagggctggtcagccaacctgggtcccctaatgtccgtgccctgccacccagggaggggcgctgttcccttgacacttcrttcagcgtcttcaagtacatggctctgtacagcctgacccagttcatctccgtcctgatcctctacacggtgagtatctgcagagctccgtacccagagccgtcccaggactagggaggggacacagccctgtgccttggagctggcaggtcccagaatagatgacgtgggcccagatcctgaccctgccactctccggctgtgtggttggagaggtggcaaggcttgggggagatgagaaaaacaccaggcacggagcctggtacccactaggtcctcacaaatggcagcagctgtcatgggctaacatcttgaccgcaactctgggagctccccaatctgcagggaagactgaacggaggcagggccaaaaccctcgcccccgccccatccccacaggtctgcccatttccccagatgcacttgctttgccccataccttggctgtacctcccacaccctacttggaggagctctcccctcccctgctctgggcatggcctgctcacccccagcgaatgaggtgacactgcagggcggcgcacatcttatacttgggtctgtccctgtgtctgcctgaaagcgaggagctccctgagggcaggaactgtgcatgccctggtagctatagggactccgcaaggcagagccgaagcctccccttcgggccgggagtttgttacagggagggaaacctcccctcagatttaggcccccaaggtcagcacaggtgccctttccatcagaccaggggtttgtctcacatcaagagcggcacctcctccgctgggctggcaggagagtacggcccccattagactgggggatgccttacccatcagattccttcggggcaggggtggggcctctgctatcagactaggggctgccagggccaggtcttagtttcccctctgtcctcccttccctgtggcagatcaacaccaacctgggtgacctgcagttcctggccatcgacctggtcatcaccaccacagtggcagtgctcatgagccgcacggggccagcgctggtcctgggacgggtrcggccaccgggggcgctgctcagcgtgcccgtgctcagcagcctgctgctgcagatggtcctggtgaccggcgtgcagctagggggctacttcctgaccctggcccagccatggtgagtagggagctgactgaccacccccatcccgccccttccctgtccaccccacgttcgttccctgacccccatccctgtacccccaggttcgtgcctctgaacaggacagtggccgcaccagacaacctgcccaactacgagaacaccgtggtcttctctctgtccagcttccagtacctcatcctggctgcagcygtgtccaagggggcgcccttccgccggccgctctacaccaatggtgccactgcgggcgcgggcgggagatgctggcggagggagggaggagccctggggtgctggggaggcagatgggagagaggtgccggccgagtggaagactggcgtgcacacgtgtgtctgtgggtgccgggggggcrtggytcctgcctgagagactctcctgctcccagtgcccttcctggtggccctggcgctcctgagctccgtcctggtgggccttgtcctggtccccggcctcctgcaggggccgctggcgctgaggaacatcactgacaccggcttcaagctgctgctgctgggtctggtcaccctcaacttcgtgggggccttcatgctggaggtggggcccgccctgggtctcagcagcgggagagaagggaggtgggggtgcattgaccccagctcagccccggctgcccctgacaccctccctgccctttgcagagcgtgctagaccagtgcctccccgcctgcctgcgccgcctccggcccaagcgggcctccaagaagcgcttcaagcagctggaacgagagctggccgagcagccctggccrccgctgcccgccggccccctgaggtagtgcaggcccacgggcaccccagacactggaactccctgcctytgagccaccaactggacccctctccagcaacaccaccgccaccacctcccacatccctgaggttggcgactgtctacactcytcccccgagaccacccccaccctggggaagcgttgactactgtcccctaccttggaccatcccgcgtaggggtggcagcccccagctcccctcagtgctgctgtcagtgtagcaaataaagtcatgatattttcctggctctgctgtgcctgtcttgtacctggcaccatagaccctcccacctgcccaggaggaaatgcacatacccccgggtgcccagctggcagcccctgcacgtgtctgcccctggaaccccctggggggctggtttttcaggctggtttttcagcctgacaaccccctggaaccccctggtttttcagactccattggccaactcccctctctgggcctgtgttccctcatctcacagtaataatgtttcctctgtgtccagcatgtgcctggatattccgtttagcttttttttttttttttttttttcttgagatggagtcttgctctgtcacccaggctggagtacagtggggtgatctctgctcactgcaacctccgcttcccaggttcaagcgattctcctgcctcagcctcccgagtagctgggattacaggcatgtgccaccacgcccagctaaattttgtatttttagtagagacagggtttcgtcatgttggccaggctggtctcgaactcctgacctcaggtgatccgcccaccttggcctcccaaagtgctgggattacaggcgtgagccactgcgcttggccccatttagcattttacacacattgtcatgtcatccttccaacaactgtggtactattcccattttacagatgaagaaaccaaggcttagaggttacacaagtagtcagagtggggccggatagctttgactccagcttcgatgttcctaaccctcctaccctcctttggaggacaaggagatgtaggcttgcctgggaggcatttgctagggggcagctccctctctcccaccttaccccctccccgtcccaccccagcatcctgggacatgtttgtgggcagttccttcctcagatgaaatccaggctcggagcccacatctcccagccagaaccacgcgcatcatccctcagggaagggtgggtgcctctgagctcatctcaccagcgggcccctggccaagcccctctgctctagagaggcagcttggccgtctggctcatctgggcaggggagaacaggaaagaccggctgtttcctgccttccaaaagccctggccaacctcattcctggaacccctggtgctatccccaggcctgccagagtaggggctgagaaaacgttgaatcatgctggggagaagggatgtgggtgtgaagatgaaagtcctgccaggaggcacatcacagtggacctctgctcctggcactgtgttgccagccagcgacggttcagggtggtagatgctgtttaagaggaagccacagagaggcctgggttcaaatccctcctctacccttagctgattattcatgaatctgttggacaggtgtgtgccaggcaccaggactaactcaacaaactgaataaaacgggacaaaaacatggtctaaccctgcgagcagttcaccatccagcgtgaaagcctggcagggaaggagcacatctccaaagacgtagtgggagcacagcaaccacagccccatcccctcccctgcccaaagaaacagccaggggaatgggtagaagcagcagagaggacatgggagccaggacacgaattgtcagctttagcccctcagtttcccagtttttcttttcttttctttttttttttttagacagggtcttgctctgttgcccaggctggagtgcagtggtgcaatcgtggctcactgcagcctctacctccccaggctcaggtgatcctcctacctcaacctcctgagtagctgggactataggccagcaccaccacacccagctaatttttgtattttttgtagagatggggttttgccatgctgtccaggctggtctcaaacccctgggctcaagcggtccacccgccttggtctcctaaactgctgagattacaggtgtgagccactgcacccaacctccctccttttttcaagggtaggggacagcatttctgctgggtgagttcctctcttttgccagtgggattgctcctggcagcagtggggtctaagggcaggcagagagggctgggctggcctggcctgagggcccacctctctccaggtgacaaaagtctctgctgccctgcaatagacactggggggcggggcatgggaatgaaggaggcacagggcatatttactccctccctaagactcagagtctaagggaggtgggggaatgactggcgatgaagagatcagatggcaagggtctaaatcaggggccatcctcatctcctcccagcccgcagcccctacaactctcactcccgcctcaggcctaggctcctgggcagggctgaaggctgcccctcacgcagaggatctgcacccccagccagcttctccgggaagagtttagtgtacagttcactcattcattccaccaatgtttgctgaactgctgctctgagccgggctctgaacttaatgagcaaaactgaagatgagcaaaaacagccttggtcctggccttcacggggcaagatgacagtctcatcgggaagagggacagggctcagatggtcacagacataggccaacaagacaactgcaagcagtaaagctagaaagcacaaaaaaaggaaaaagggaaggcccctctgaggaagggagggtttgatctgtgaccccatggaggagacctcagccagtgctcgggaggaagaaacgcctcagtgtgggagggagaggggtttgggagaaaacccccaaargccagtggctggaggaggaagaggaggcagagccaggctgccataaagggccggggccctggaagccacagggaagttgagcctctaacctgagtgaaaggcgatcagtagaaggggcacgatctgcgggggtgagggaggcaggacccacgtgggagagcccagagtggaggctatcgcagagcccaggcaaatgatggtggtgtcaactaaataagaaatcagccttttgaccaggtgcagtggctcacgcctgtaattccagcactttgggaggccaaggtgggtggatcagctgaggtcaggagtacgagacgagcctggacaacatggagaagcctcgtctctacgagaaataaaaaaaaaaaaaaaaatagccaggcatggtggtgggtgcctgtagtccccactactctggaggctgaggcatgagaatcgcttgaacccaggaggcagaggttgcagtgagttgaggatgcaccactgcactccagcctgggagatagcaagaccctgtctcaaaaaaaaagaaaaagaaaaaatccaccttttggccaggcacagtggctcatgcctataatcccagcactttgggaacccaaggcaggcggatcagctaaggtcaggagcctggccaacatggtgaaaccctgtctctactcaaaaaaaaaaagcaaaaattagcctggcatgctggcatgtgcctgtaatcccagctacccgagaggctgggttgggagaacctcttgaacccgggaggtggaggttacagggagccgaggtcacaccactgcactccagcctgggcaacagagttaaactccatttcaaaaaaaaaaaaaaaatcagccattgaaaaaattaaagttagttttattgagtcttactgaggactgcaccctgggagagggtttcagagagtttctgttagactgcgccaaagcagcatttcagcccacagtttagatacagaggcaggcggttctgtgtgtgctcagaagctatggtcaggcacggtggctcacgtccgtaatcccagcacttttggaggctgaggcgggtggattgcttgagctcaggagtttgagaccagactgggcaaacacggcaaaaccccttctctacaaaaaatacaaaaaaaaaaaaaaaaaaaaaaaattagccaggcatggcggctcttgcctgtagtcccagctacttgggaggctgaggtggaaggatcacttgagcccaagaggtgagctgtgatggtgccactgcactccagcctggatgacagagcgagacccggtctcattaaaaaaagaagaagaaaaatttacatcaaatgtcttcagaagctacactagtgcaaatctcgccaaggtttgggttcgaggatgcacctagttatatagattatagaggcataatcgtcaatcctgtcaggtgctatcttatgtacaggaaaaggcacagccaggatcatttaacttatattttctaacaatgcagtgattcaggcaagaggcgtgggagcctgtgttctgccctgcctgccatcttcaaggcatccttccgttgggctgcccccagtcactgagtcagggctttgtcagcttctgacaagcagaaagagcaaatgcggtttcttgggattgcaacttggtctcacagtggcttaggccagggtgggagcagtgaacggagtcacaaaagaaatttttcaggtagcattcacgggtgggtgctggattagatgcagggctaagggcaggggaggaagcctgggtaatggaaggctgcggggccaaggggggactgggaatcctggagggccaggtctgggggagagttaggaggtcgtgaatttggacttggatgcttgttgaagctgatgcatcttgaggacatttgtgggacacataggctgggtcagggctgaaagaggtgctggttatggccgggggcagggactcatgcctgtaatcccaacagcccaggaggatgagacaggaggaatgcttgaggccaaaatttcgaggccggaagttccagacgagcctgggcaacacagcaagaccctgtctctagaaaaggaaagaaagaaccgctggttgtggaagccagccatggcccagagctcagcagtgtaggagaggagggtgcgggcctgagagaggcagcaggcttggctggagaggcagaaggaaaaccaaggcaggagagtgtcctggaagctgggagaaggcagagggagatcgaggcttactttctggctgaggggcctagggtgagtcactttgggaggcttgatttcctcctctgtgaaatgggcaacacacctacccttgcccacctcacccccctcaccccgtcgacgtcgagtgaggagcagctgtgaggaggaggaagctttgcacagacgtgaggacggccccgggcgcctctaccccggggacacccccccccccaggagatggaaccccgagggcacggcgtggcggcccatgcgggcagctcgcgttaggacccagcggctccggggctggagggcgggcgccagccccgtcgggggcccggagggggactcggagcgggccaaggggcggctccggcgggcggactcggagcgggcggcggagtgacccggacaggtaggcgcgggcctggcgcttgggggccccggggggcggtcaggggcgtcggcgggtcccccggcgcgggggcgagggtgccaggctctctgggtcctcgatcctggggcagccgcggaggttcctgaaccccgcgccttcagagcggaggccaagggggcacctggaaagtttggggttgctctgcagagagaacgcgaattgggaagggcggggagcccgagtttggggggagccagaggtgaggtcgtcgggggatgggacatcttttgttctcccggggaggttggaatgtggcgggtggggtggggggggggggtccggtgggaatggccgagacagagacgcagagagacaaagagagatcagagacgggagcgcgagggcgcgcggagcaagtttccgcsgctgattgttcccagctgtgcggcgctgcaacatctgggtttctcccgccgggacccctccccctgagcccggctctggagccggcagagccctccctccgtctgatgtctgagcgagcgtcggggccccctgtcccccacctcccaggacgcaggggagtcgggggtgggggaggccgcagctgtggaagaggccagaggtgggggtggggcagcctcck

SEQ ID NO: 95248 - DNA, 64693 bp, Homo sapiens
tgacagggcaagactctgtctcaaaaaaaaaaaaaaaaaaaaggaagaaagaaaaataaaaatgatggcaaccacaaatgtgtgcctcacaggtaaccacattttctagtagccacatttttaaaagctgaaataaataggtacaattaactttaacaatacgtctttgggctttttgatgtttgtttgtttgagacagagtcttgctctgtcgccccagctggcatgcagtggcacggtcactgctcacttgcagcctcaacctcgtgggctcaagagattcccccaaccttggcctcccaagtagctgggagtacagggggtgcatcaccatgcctggctaatttttaaatttttttgtagagacagggtcttgctatgttgcccaggctcatctcaaactcctgaatgttagtgatcctccctcctcagcctcccaaagtgttgggattacaggcttgagccaccacatccagctaataatacatttgcatttaatgaaatacattcaccatattatcattccaacatggagtcaattatttttaaaattaccatctttttctccttgtaactccttgaaatctgtattttacaccaggggtccccaacccccaggctatggaccattaccagtctgtggtctgttgggaaccaggcacacmgcaggaggtgagcattgggctagcaagggaagttttgtctttagattcccataggagcacaaatgctattgtgaactgcgcaggtgagagatctaggctgtgagctcctgatgagaatctaatgcctgatgacctgtcactgtctcccatcacccccagatgggaccatctagttgcaggaaaacaagctcagggcccccactgattctacattacggtgaattgtaaaattgtttccttatgtattacaatgtgatgatagaaataaagtgcacaagaaatgtaatgcgcttgaatcatcccgaaaccatccccacccccatccatggaaagcctgtcttccacaaaacaggtccctggtgccaaaaaggttggggaccactgttttacacctacagcatgtgtcagttcagattagccacataaaccttgtctggcagtggctacatgttggaaagcatgggtctaggacctcccaggcttactctggccccctggcagcccctcagacaactggcttattacatcttctccagaattcacctttctagctttgcttcactgactaagggtagaaccctggcccggacaagtcatcttacccttggatgtataaaataagggtaagaaaaatacttacttctggggttgtagcaaggattcaatgggataacatacacacagtgcttagcgcaggtgcctggcagggaataaatgctccataaatggtgacctaatgaatgaaagccttagcccatctttcagcatggtgatggttaattttctgtgtcgatttggccaggctatggcaccccatcatccagtcaaacatcagtctggatgttgctgtgaagatatttttcagatgtgatcaacgtttaaatcagtagactttgagtaaagtagattgcactccaaaatgtgggtgggcctcatccaatcagttgaaggccttaacaacaaagactgaggtttcccaaagaggaggcaattcagcctccagaatgcaacatagaaaccgtgctgtttccaacctgtagatttcagactcaagaccgcaacatcaattcttctcccatttctgactggccagctctacaaatttcaggcttgtcagcccccacaaccatgtgagccaatttcttaaaataaatctctctctctgcatatataaatgtacccccgagtggggtacagccacagcagcacgcagaagagacatgacttcctcattctgaactcacgcagtattagaacaatggagcaccccagcccttccccgcctctgagcacgatgtctctcaggaccgagagctgaggcagaggctgaatcaacgcccccatcccagagactcttctcaagggagtgagaccaaagggtgggctttgccaggggaaagggaatgtgacggggccaggcagggccagggttatggggatctgctcttgagggtatgactgcaggtccccatggtgcagagtcaggggttggggcgatccctggccacagaaggattgctttggggatccatggcccagaccccgacctcttcctttctctggtctcctgccagaattcctgtcaaatttagctgcctacagcagccagagtgattttcctaaagtgtacatcgtgccgttgacaccttccaaagtccttcccaggcttcccccatgaccccataaagataaagccccaaagccttttccacgacttacaatgctctgtgtgacctggccacagccagcccagcctctcacattgtggaagctttgaagtatgttatcaaacagcatgtagtcagaagcccatgtttacaaaaacttaaaataactatatacgcataggaaataactaccgtctactggaacttgggtctgtgccaggccacgatgtgcagtaccttactggatatcatcttgttattccttgttccttataacaattcctagtatctcctttatagaagaagaaactgaggcccagagaggcccccagctagtgaggggcagagccagacttgaccccaggtccaccaagaccaaagtccatgctcttcactgcaggctggttggtgcctctgtgcagatggaagataataatagctctcacctcacagggctgtcgtgaggattaaacaggctgagatgtgtgtgtgaatgggctctgaacagctcctggcatggcgcaagggctcaggaagtrtgctgccccacagcagcctgtgggcagcccggccagatcatactcatagattcagactgatctctggtactagggtcatgggtgatcatattttttttaacttttccacaatgaccaggtaatacttgtgcatttttttctttctttttaaattattgtatgtatagtgctctcagtaagctgtctgtttcctcaaagcaggcttgtcgaagtttgagtggcctccctggttcccccaaggcctggcccggagaccccacacccagtggaggaacctaacagaaaacagctcagaagagcccctcttagcccaggcaccctgcccacaggcttggcaggggcgcttgctggaggggtgggtgcgggtctgtgccaggaactggcctaagctaagtccccaaaagacaccgtgagatgctttgtggctcttccggatcccaggggagaggtgggagcarccgtgatgcatgcgacctccggccctgaatccaccaacagctgtgactacttcagctattttaaacctctgggcaccaggaaactcctgtctcatcaaccaggctctgggcccaacatgatggcctgagcccgggcaggagtcctgagtgtgggtggccaggtctgaattgggtttttaaggggagggggcttcatttcttgagccttgtgccaggctctgtgctagtattttctgcaccttgttgtctcgtttaataccgtccttacaccgtgctgagggatcagttacttcacagaggcagaaaatggggctccgaatggcagggtacctggcccaaggcggcacaaaagcagagctgggcctagaactgcgacttccttatctacaaagcatggacagcattctgcccctgccctcactcggccttgccccctgcctccaccccagtggccctgcaagctcctccctctgccactcttaggagctctgcaacccagagtcaattcccccacctcctcacagctcactttcttcatctgtaaagtggcggagttactgggagggttcagtgatctaactctaatacatgaaaagagccgcttggaacagtgcctgacccacagaaagaaagcagtaagtgcccgctcttactccagctcccctgggtattgcggtctgatgttatcactatcttgcccagtgtcctgttatgagctgcccggggtctccgtcagtggggggtacagtgtcctcccccactctggccccagtctccccatgagtcaaatgaaagttagagccccaggaaggtgagaaccctggtgggtgcccgttatctgtcacacagtaagggctccaaagtcactcgtggcagaggggtgcccagacacgagctcacctctgggggcgcctcgaagtctctccaagctacacaagttttgtcccagtttggcaggtggccacccgagagattcctcctgattggaggatgtgctcagccgggtgcctggagttcatcagaagttactggcctcggccgggcgctgtggctcacgcctgtaatcctagcactttgggaggccgaggcaggtagatcacctgagatcaggagttcaaaaccagcctggccaacatggagaaaccccgtctctactaaaaatacaaaattagctgggtgtggtggtgcctgcctgtaatcccagctacttgggaggctgaggcaggagaatcaattaaacctgggaggcggaggttgcaatgagctgagatggcgccattgtactccagcctgggtaacaagaggaaaactctgtctcaaaaaaaaaaaaaaaaaaacagttactggcctctccctgggtctgtgagctgtgcctttgggggacaaatgacctcctggctaaaactcgggccttccctcttccccactcacattcctcccaaatccctgccactcagaagcagctgggctcttcaccacctcctaatttgggccgcctcagggagaaggttggagtccaagggctgggtatatcagcactgggcacttgtgggcctcacccctcttgtctgggggcacccgttcctggagctccatcttccatcagctctaactccttcccaaacacacatcccctccgccccactccttccctcccacggcctctgcccaccccccctcagtttctgtcctcacctaccaaagaccacttcctcacacagggctgatgtatgtgtctgaacagcactcccactgggtcccaggggaagggctgggacatgggaggggctggccgaggcccacactgattgtcatcctacatctcagcctctgtgagacacacgatgacctctgggtggcaccccccttcccttggtggcccaggccagaaccggggccctaatccttacccctctcctctccctccacccacacatcctatcagtcaccaggtgccaccaaaatcccagtccctaagcagtggccgggtcagtccccacctctccagctctggccacagccaggggcttccttgcccctccccagcccagaatgacccatttcacgagcacacccgaccacggctcgcggagacaaccactccaggctcccatctcccaccctccaatgccttggcttggcgtcctggtctccctcagctgccgggttccccatccccaccgcttcccgttttctctatggtgaggttcatctgactgttgggggatgggggtaccgggctgcacccggctttgcacaggcagctccctctcctcgcctttaatttgcaaacgcctcctttaagaaggttccaggatcgtcttctctgggaaggcttcctggcccccaggctgggttagggcaccctctttgtgttcccacatttgcattttcagccccactgggctggggcgtccggaggggagctagggccctccaacacctgggcgcccaccgaaggtttgtcgaatgaaagaatgacaatccaaccatggaaagcacaaaactggtccctgatgacttcgccacgacctcagcggggcgggacgagttaggggcgggaccacgcttgacggacaggcccgcagcccactgcgagaggactggggcgggccgccccgcccaccggccgctggataaggctgcgcgcggggccgtggggcgcaggctgctggagaaggcgcacctgctgcaggtgctcscggccgccccggaccagcgagcgcgggcactgcggcggggaggatgctgcgcgagcggaccgtgcggctgcagtacgggagccgcgtggaggcggtgtacgtgctgggcacctacctctggaccgatgtctacaggtgagccggcccaccgtgatgcccgggccgagatctcgagcccagaaatcctgagacgcgctcagactcggggacgtggacagcctttgtccagcccgagttgtccctcatcccgagcccccgagcccagaaatcctaagaatctcatccagaaacctgacaacccccgaaccttgtgtccaccttccwgaaaccctgagactctcccagaccccctaacacagcctcagccccagctccctcacagaccctccctttcacccgtaaccctccgtctggccstctccagttctcctcccgggggacctcacaccccttcagcttccctgccgtcctctcccctttcacttcccctccgcacctcacttcccctcggacccacctcaacccagcccctctcctgcttcccactcccagttcagcggagcttccgcggagacttgccggggactggggcaggacccgaagggagctgccctgaggctgaatcyggccctggaggttactcaggctccgatttcgccctgtgggggctgctggtggttgcttgtccccaggcactggccctgagctccgtgtccccagataccttcccctgacttcattctgagaccacagagggacaatattctacccagctgacgacggggacttggggtgtatagcggggtactttgttggaaaaggatcctrattcagagttctgctccctccccttctctctgtccaagaacttggtagagtgcgggatgtccgagacagctgaaggtagggtagggccctaccactccccccgcaatcccagaaagcagccaagtccaatgatctgtctccctgagtaatgggacggggccttggaaaggtgtggctggtgtgaatgaaagggtggggttatgctggggtttgatctgccccctctattccaagcatttaaaacctccccattgctagggttggaggggtcagtgctgggggcagggagcatgcaggactctgaggtgggacmctgtgctgacaccggatgagtcccctatcctctctgcctcaagctgaactcacacggaggcaccatcgtggtttatggctctcaaatcatcctgacacctggagcaccctgcctctyccaggcccccaccaacccatcatgtgtctccccacacagccctggcagccctcccacctgcccaaccagtctcctgccaccgctgcagaggcactggccacgctgataccaacaagccccaggactagggacccactccatgcctctgtccctggcctcaacctctgccttyccctgggcctgggcttcagttgtcccccatgtaaacctcagaggtggactgggtggtctctgagaacaagaacacagcagtggagggtggtccaggctctggtggggtgcaagagctcccctgccttccccacccccagccctgaactgggcaccgctagggagtgggcgcggagccagagtgctcaggtctctaagcctcagctgtcaccatacccacctgtttatttgctggggcatggttggtgccgcctgaaaagctggcatgatcctcccagtcgggggtggggagcaaaggagggttcctgctcaggcgccctgctatcgctctatcctggcaaagagaggcccagctggggtaggggcacagagtggggcagatatggactcagcctccctctagcagggggcagcagtgtgacgattccccttgtcctgtctcaacgaccacaaagaccctaacccccaccggcacttaaggttctccaccaccacagagaggggcagtgcgctctagaccagtactgtccagaaaagtccagtttgaaccacaacaaaaccacaattgcattttaaatcttctagtagtccacacttttttaaagttaaaacaacaggcataattttaataatatattttgtttaacccaatattttagaatattatcatttcaacatgcaatcaatataaaaattattaaggaaatggtttaccttccttttttcatgctaagtctttgtaatccagtgcacattttacacttcagcacatctcagcgtagattgagtgcatctcaggtgctcactggccaccgtgagccagtgacaccgggacagaacaggtctagtgcagagtttctcaatctcgcactattgcattttgggctcgatatttctttgttgtagcgggatgtttagtggcatccctgacctctgtcccctagatgccagtagcaacccccaaattgtgacaaccaaaaatgttgccagacagtgccagcagtcccctggcagggggcaaaatcacagccagctgagactcactggtccagtggaaggaagcctcttccaggactaaggagcttgagttgttactgctattgtgactcgagttacctgtagtaatgagagcaactgccagtattgataacaggaggaggtattagtgggcacttaggaactgaacccaccacctcctttcttcctcaccatagaccctggagggttcattgatcatcccattttacagatgaggaaggtaaggctcagagagatgaagccatttgtccagagtcacacaggactcaggtccaggtctgtttgactcagaactcatgctcttataccccactctgtcctatgtgaccctaaaaccagcgggttgaactggacggccctctcagcctgtgtctcttccaccctggccacgagcccactgtccccagagacttcaccaactcccatttggccctccactcttccctgagtcctttgctgcccggacacaggtcctggctcaagaccccaagtgatgcccccagagcctccaagtagaccccaaggaacaaggcccgggggtgctgggcccagttaattacggagtggcatcctgaccctcactccttctgagtcgcaaaggtgagcgaaacggcctcagcacccactccctttcccaagggctctggactccctttcctgtsatgctggcacacaggatcccctccagacacatagcaggggcctccccagcctcattcctcaatagaccttgtggtcctggcaggcactgccctaccagcttccatccacgggctgtgtgaccttgagcaaatcgcttcacttctctgagtctccactgacccaaatgggggtcgatcagagaacaggaggaaggatcttgtattcaatagaagatgtacactcagggtcacagtgatgaacaattgaccactatgctgccctatgaggggtcatccaggccaccatgggcaggggtgctctgggccacccacgctctcccagcaaaactggcccccctggggatggatgccttgacctagcctcattctgactgctagtctccagcaagcaatgaatagatacatagaaagaaggaagtagggtgtttgttagaaattgtactttgtgattgttgttaaagatactcgctgtttccttctgctcttcccaaatatactcatcttagtcttggcacaggtacacctggcccacacaatctcctccggtggtccctttagccgacagtcacttcttcagtggggctggcctgggtccccatctgatttgggcttgaagttggaaagagagcacagagggagtccctaggttggttccatcctggccacccacctcttgtgagccctggaggcatggacactcccagagtctggaaggattattagggacagggcagcctcggagtaaagtaggtagcagggtggtcactctctgcccacaagctgggccttgggaatggcttcttctgttcctccctcggcttatgcctctgtcagtgagagttctcgagaaggcagggctcttcttttcctccctggtgtacaggagccaggatccagatcctgaggtctgcaggagcttcaggacactggaatgatcttaacattgtccctttgcctgtgcagaggttccagctgcgtctgtgaggtggaggtgggaggattcccttccctgggattccccaaggcagaggctgaccagccattgtcccagtagaagacagaaagaagataaatgtcagctagtaatatcaagtaaatagtaataatttgcccataactcgctggcagaagataggaagaaggtatcaggcaggcgctcctagactttggcacaaactcactcccagactttctgtctcttggttggtgtgaaggctagagatgtatttgcttttttaaaaagtgtcattaggacaaaggccaggagggtctgagatccagttttccatgatgggggcctggggtgctatgggctcccctccccatagtgtgccaggccctacctcactgatctcctcttctagcaattcctcagcacacactccattccggccacgctggctttgtggatgctgttagcccttggctgtgccaagctcattcccacctcagggcctttgcagttgctgttccctctgcctggaacaccatcccccagatccccacaagcctgactttcatcagtcaagtctcagctccaatgtcacctcctccaggaagctttctttgactaccccatgtcgtggtgccctaccctgagtcccgagaactctgtttcatcacatttttttctttgcacaacttctcatcgtttcttaatgttactagttgacatttattgaacacttattttgtgcaggcttctcaacactttgcatgctcatctcacggacatgtaataatttacgtatttaaaccttgcaacaactttatgagttaggtacaattattgtccccttttcgcagctggggaaactgaaggaaggagtgtttgtccaggatggcacagccagtaaactgtggggtgcagagcccaggcccctgcctgctctgccaggctgccctcctggtacttatgtttcaggcktgcctcctccttgtttgtgatcctccctggagtcaatgaagggctccctgaatgaatgaatgaatgaacgaatgaatgaatgaatgtggcctgtgatgcctgtggactggcctgtcatggggctgagctccccacccccagcctcaagggacaggcaccgttggatgggcctgtggaaggtcaagggcatgtggccaagcttggcccgagcagcgcttgctcctgagagaatgacggtgggaggaattcaggccaggtcaggtggcccataaattagaacagcacccagagccctcaaccccaaacgggatgccttgccaggaattgctccagggctctggtttcaggctagtttcctggggttgggagtgttctaaggagaaccaggctcacagtccctgcatagttggggtccctgagaccttccctcattgactgcagggccctgagttgggatgggagcacagtggcaggggctcaccccagtgcccacccctagctggccagacatacctgctgcactttggaggaggcagcttttgaaggcagctctttcctgcccagccacgccagaccttgcacccagaggctttgatgggcccaggcttgcttctctctgtcattgacccaagagcccaggacaggaagccagtctttagtgtcccttctctgtgtctcagactcccacctgtgaaataagtaaggggctctcatttggtcctcttcagagccaggcctgatcctcccctctgccccacaccaggcacacctacctgggggatctcaggaaagactccagactttgaattctctcccagggaggggacagccaggcccaggtctcagagagcctgagttcccctcacactcggccatgactgtccctgagayttgaagcgggtgcttgccctctaggggcctcaatgtgctcatctgtaaaatgaaatcacagtggtatgggcctcatggggttatcgaaagaatgggctgaggtcatgtgggccatgggcttggtacagtgcctgagacataatgaatactcagttccctggtggtctagtggttagaaaaataataataataataataataataatagtaaatactcagtaagttgttatgtattagtattgagtttattttgaaaacaagtaataatgagacctgatccctctcctcaaagacttcatagcacttatgggaaagaaatctagaactgaatttattaagtgttgtttgagacaccaataaatggagggagagatatattctggctgatgagatcagggatgacttcctggaagaggtggcaactgagctgggtcttgaaggatggactggggttcagagtgagaccaagaacatgccactcaggggcagagataactggcagggaagttggggcacacagagacagaaagggcacagcttcagaggcctggagtataaggctggagggtcaatgagctctaaccaggctttgaatgcatygttcagacattggactttgttctgtaagtagcagggagtcactgaaggtttctgaggagaggagtagctatagatcagattgtttcttccctaaggagaggcccgrgacagctggatgcaccaggtggtgagggaagctggctgaaggcagacgtcatkgtttgcctccactgatccctgttcagggcagctgcccacccacagggccccagccaccaccatgccgagcaccaggtgtgaggtctggactgaggtcattctccccgctggtccttgcctgcctcttgctcgccatggggttgcatgacaggctggcacccacgactccccccccagactcctctaaagccccaagagcaggatgtcacacccaggctgccaggagctggggtcactctggggatgagccccagctggtgttaatgaggcccaggccaggcgggcaagctaagaaagccagatgccagcaaggagcaggcgcttcatgccctcaagtctggggctggtgagccaccccagccctgcaaggccaagccagtgaccctccccactgaccgagccaagaccagagaggaccatggctcctagagaccacaaagcatttgtgggactgggcaagtgtcgtttgtttgacaccaacctagtggccatttctctccatttccacagccactatctggtcccaagacaccataatcgctcacgtgggcagctgcagccacctcctccccacttcctctgttgctttcctgaaatccatcccccaccctgcattctgggcaaccctgcaccctggatgatctatctacagtgcaaaactgatcatgccacccctgcttagaaaccttcagtgacttccctctacaatcagaggaaggccagctcctcaccattatctaaaatccctgctcccaccactctccctcccccttgctcacaaactccagacacactcccctctttccagcttctcgaacatgcaggactaacccccacctcaggccatcacgcaagctgtcctgttgcttggaaatctctgctcctcttcctctccttccttgtccaactcagtggttgtcaaactgtgggggaccagcagcatcaacattacctgggagcttgttagaaatgcagtttctcaggtcccaccccacagtcgatagatcagaaactcaggggctgggcccatttacctgtattttagtaggccctgtaggtagtggtaatgcacactcaaatttaagaatctctggtttaattttttttttttacagtcagcactgcaatggtgtaattaattcctgcctgtcctttagattataaagtttaaaccttagttcaaatgccacttcctcagggaatccctccttgaaccccagactggggcctcatggcaccctctcctcctttatagtaattatcacagctgtaatcatgtaatccattgaaagtctgtcttttctgkccaggcacagtagctcacacctgtaatcccagcactttgggaggctgaggcgggcagatcacttgaagtcaggagtcccaaaccagcctggacaacatggtgaaaccccgtctctactaaaaaatacaaaaattaaaaatagccaggcgtggtggtgggctcctataatcccggctactcaggaggctgaggcaggagaatcgcttgaacccaggaggtagagattgcagtgagccaagatcatgccactgcactccagcctgggcaacagaggaagactccgtcccaaaaaaaaaaaaaaaaaaaaaaaggtctgtcttttccatgggcccagggaatgtgtttgctttttcactaatctacccctcaatgcctagaactgtgcctggcacattgtaagtgctcagtaaatacatgttgagtgaatgaacgaccatataagtaagcccgcctcctccagccctcctgcagcaaacatttatacttacggtgtgcccatactaggccaggtgctgaaacaaacaaacaaacaaacaagaagatccaatccctaccttsaaggagtgaactgccaaaagggccagtaactgtgggggcaaatggatggagttaggtcttcaaggagagatggacatttgccaggcagagaagtcaggggaaagtcttgctggtaaaaggaacaacatatgtcaaaatgcacagtagatggaacaatgcagggagctgaagtggtggaaggaaccgcagaaaatgaaaccagagagtcaagctgagttgcaatggccaaatgtgcctagttcaacaccaggatgaagagtttggatattcttgtatgggtaggcactgaggagccagtgaatattttcaagaaagcccatgacctgatttctgggttttttttgtttgttcgtttgttttttaaatcacttgtgtaatacagcttggaaagccaagaagggcaggtgcattcattcatgtattgccaaagactacactgagcatatccatgtcctgggttctgggattccatggtaggcaggagacatggccacagtgattggcagcctgtccctccatccatgctctccttagcctctctctaataagcaagaaggtcataaccacccccaagccccctccctttccctcaatactgtcctgggcccctccctgcagcctccagggacaatccaggtgcctgaagcccctggctctcgggtttctgcgagagagattctaaagggttcttcctgaggaggaaggcagccaacaggatctgcaggggcacaatgggcccctttattgctttgcccagggccactccaagaatagctgtttgctcagctcagaacagggctggtgctggggaataggagggtgtggggccctggagctgcgatgtgggctgggcgttaaccctctggagcctctgaggcctcctttggtttctctctggtccagaggaatgaaggtgggcaggaagcatcacttacagtaactgagtcagggtcctaaaagatcatcttgtaaaacattttttcctaaatagaattgtgtgcagaagctcaatatataaaaccagatgaaataatagtggctctgggtcaggcatggtggctcactcctgtaatcccagcactttgggaggccaaggcgaacggatcacttgaggtcagaaattcaagaccagccaggccaacacagtgcaaccccatctctactaaaaatacaaaatttagccaggcatggtggtgcatgcctgtagtcccaactacttgggaggctgaggcaggagaatcacttgaacctaggatgcggaggttgcagtgagcagagatagcaccactgcactccagcctggatgacagagcacgactctcagtttaagaaaataaataaataaacaatagtagtagtagtggctctggttaaggtggggaggggagtggcaggaatccagtggagatatcccaagctttttttttttttttttttttttttaataaacagagtctcgctctgtcacccaggctggagttcagtggcacaatctcaactcactgcaacctccacctcccaggttcaagtgattctcctgcctcagcctcccgagtagctgggactacaggcacacgccactacgctcggctaatttttgtattttttttagtagagatagggttttgccatgttggccaggctggtcttgaacttctgacctcaagtgatccacccacctcagcctcccaaagtgctggggttacaggtgtgagccaccgcacccagccatccccagctttccagagccttcctcctcacccctttgcccagggcctctcctctgcactctctggactcagccacctctgctctggttccatcctctcacctaacactggatgaaactgagagagggaaagtccctggcccaaggccacccagcatgttgatgggcaaagctgagacttgcaggagaggaatgcttcccagacctgaggccatagtttcccagactctcatggctttggccaaaaccatcttcaacctgtctcactataacacttttctttaacccagctcacatttttcttaataactttattttaaacagagattttatagcattaccataaatggcaagactttatcagtcaccataaaaagatactgtgtttgataaacacataagtcttcttgtagattgttcctccctgtgccacctaaagcatccagggtgtgtactcacacctctccttgggaacggcttaccttccgtccgactcacctctgccctctttgcttgggtgtatgatgggccaagccctgtgctaggctctgaagaatgaagatgggagaggccggaccatgccctcaggggacttataacccaaaggagggcaggtaccacgtggcaacaccactcagcaaaacgtggccccagccctagggggagtgagagacgagagctatgggcaggagggtggcagtcctcctgaggcgtagggactaacagatggacattcagaaggtgcagaccccctcaagtcaggggcaaaactagactcaaacccaggtcctctgcacgtgcacccttagtccagggcttttgtccagactctgtgcccctcttaatgatggatgtggccaggcacggtggctcacgcctgtaatcccaacactttgggaggccgaggcgggtggatcacctgaggtcaggagttcragaccagcctggccaacatggtgaaaccccaactctactaaaaatacaaaaattagccgggcatggtggcgggcacctgtaatcccagctactccagaggctgaggcaggagaatckcttgaaccaaggagacagagtttgcaataagctgagatcacgccactacactctagcctgagtgacagagagagactcctcctcaaaaaaaaaaaaaaaaagtgatggatgcggagaggggacagcaagccatgaccaagaagtgtccagtctcacatcatcccaggacaggctgtggagtttggaagggggcaggacaagaaccagagtgaccttggggtgtcttcattgagctcctctcccagcactggccacaggctgccgagtccttcccaattctcctgccagagcccaagaccagtagtctttgcccatagcccctgaagtctgtggcccaggtcagacagacactgcccrgcagcctctacagattcacgctcacggccttggccagcccagggctctcagcagtggaccrcagtgctgattgtctggaccagtggttctcaaagtgtggtactgggaccggcagcatcaacagttcctggaagcatgttagaaatgcagattcttgggccccatgccagacctcctgaattggatgctctgagatggggccccgcagtctgttttgacaagacctccaggtgccgccgccccagacactgctgctgcactttgacagccgctggcctacacttgtcattcaaccctggccactgtttccatcttcagctgccccagcaccctcagcctctgccatgccagccagcctctccagagactggatctacaaatctacagccttcaaagaaaaacaccctatagatttaaacagcacccctgatgattctgatgcctgccatagttgagaactcctggaacccaagagcaccaggcccccaaaatagcagctgtgcctttgagacaggcttacacctatgtcttagtcacaaatcccaygagaatcccacctaagtccctctgagccctyttgggcctccagaccagtggctggatttagcaaagccgccagccctaggcaccttcctcccttagtcccctgtccttcctgtcacctctccttaagccaacamcaaaacaccatggacagggtggcttaaaaacaaattcatcttctcacaattctggaggctggaagtccgagatcagggtggtggcatggtcggggttctggtgacggctttcttcctggcctgcaaatggccaccttgtcactgcgtcctcacaagatctttcctcagtccatggagagagatctctatctacctatcccctccctctcttgctgctcctcctcctcctcctcctcctctctcatctttcttctcctatttgattagaagcctgcccttggccagggtggctcacgcctgtaatcccagcactttgggaggctgaggtgggtggatcacctgaggtcaggagttcgagcccagcctggccaacatggcgaaaccccgtctctactaaaaatacaaaaattagctgggtgtggtggtgtgcacctgtaatcccagctactcagaaggctgaggtaggagaacagcttgaacccgggaggcagaggttgcaatgagctgagattgcaccactgcactccagcctgggagacagtgagactccatctcaaaaaaaaaaaaaagaagaagaaaaagaagcctgcccctatgacctcacctaaccttaattacctcctaaaagctctatctccaaataccatgacactgagggtgaaggcttcagcatgctaatttggggagagacaaacattcagtacacagcagccagatcacatccatttgttctcctgctctgaaatactttcggagttcttgaatttyggaattcaagaattccaaaagtatttgctttgcaatggaaaaccacttttgaaccccaagaaatgactcagaaggtgggggatgtcaggtggcaagaaagctgtggcaggaaggaagggatctttgtaacaagagacaccccacctctgccctgttaggacccaggcactgggctccatccctgtgargactcagcactttactcagcgaccctgggcagggagacagggttccaggcccagctctgctagtggagyaaattcattcctgcctgggtctccatcttccaccttcacaggaccctgtggctcccaaaactggcctcccatcagaggcactaggaagsttgttaagaattcagatccccaggcccgaccctcatacattcacactcaggaggtgcaagattggcccaagagatttcatgttcaacagatgtcctcttcacagccaggtgactgcaatgcagctggcccctttggggtctcccagatcagattacctgtgggggcccttgcagacttgcccctccagaagtcttcttttttgaaaaaagagccgggcgtggtggctcacacctgtaatcccagcactttgggaggccgaggcaggcggatcacctgaggtcgggagttcaaaaccaacctgaccaacatggagaaaccccatctctactaaaaacacaaaattagccagctgtggtggtgcatgcctgtatcccagctattcagaaggctgaggcaggagaatcgcttgaacctgggaggcagaggttgcagtgagccgagattgtgccattgcactccagcctgggcaacaagagtgaaactctgcctcacacacacacacacaaaaaagaagagacagggtcttgctctgttgctcaggctggagtgcagtggcacaatcatagctcactgcagcctcaacctcccaggcttaagcaattctcccacctcagtctcctaagtagttgggaccacaggtgtgcaccagcatgcccagctaattttttaatgtatataaagacaaggtctcactgttgtccaggctggtctcaaackcctgggctcaagtgattctcgggctttgacctcccaaagtgctggaagcaggagtctcctctcgaagcccctcatcccacctaccccagggctctccctaaccctctctcatctctccccacagcgcggccccagccggggcccaaaccttcagcctgaagcactcggaacacgtgtgggtggaggtggtgcgtgatggggaggctgaggaggtggccaccaatggcaagcagcgctggcttctctcgcccagcaccaccctgcgggtcaccatgagccaggcgagcaccgaggccagcagtgacaaggtaccacggcgggaagtccagcctctgygggcccgggaccatgccaggatagaggcagggtggaccagccctgtcccatagaaactgcacrtgggacatgtgtcattttcagttctgcagtaaccacattgaaaaggcaaaaagaggccrggcgcagtagctcaagcctgtaatcccagcactttgggaggccgaggcgggtggatcacaaggtcaggagatcgagaccatcctggctaacacggtgaaaccccgtctctactaaaaatacaaaagattagccaggcatggggcgggtgcctgtagacccagctacttgggaggctgaggcaggagaatggcgtgaacccgggaggcggagcttgcagtgagccgagatcgcaccactgcactccagcctgggcgacagagcgagactccgtctcaaaaaaaaaaaaaaaaaaaaaaaaagaaaaggcaaaaagaaacaggtgaaattaattgtcttaatatctattacttaaccctatctatcaaaatattatcattttgacatgctatcaatataaaaaatattaacaaaattgtttgttttttgtttgtttgtttgtttgagacggagtctccctctgtcacccaggctggagtgcagtgatgcgatctcggctcactgcaagctccacctcccaggttcacaccattctcctgcctcagcctccagagtagctgggactacagacgcctgccctatgcctagctaattttttttttttttgtatttttagtagagatggggtttcaccgtgttagccaggatgctgtcgatctcctgaccttgtgatccgcccaccttggcctcccaaagtgctgggattacaggcgtgagccaccgcggccggcctgtttgtttgtttttaagagacaggatctcactctgactcccaggctggagtgcagtggtgcgatcatagctcactgcaacctcaagctactgggttcaagcagtcctcctgccccagcctcccgagtagctgggactccaggcacctgccatcgtgcccagctaatttttttttttttttttttttagagacaggtcttactatattgcccaggctggtagtttatattctttttccataccaaatttaaaattagtgtgagttttacaccttataacacacctccgttcagaatagccgcatttccagtgctcggtagccatgtggatgttgtggggttagaccatggaacgatggcttcgtaaaggatgaaaattatagacagctgagtgatagaaagtttagaggctcagaaccatagaatcattggagcttacagtcacaagtgtccttggtctatctgtaaaatggggtgctgaacatccatgggtgatttgcctaagtggtgaggctgagaccagaactgtctcctttctgggttcygtaattatgaactttaccatgtgccccatcacagtgatggcattgaacatggtccaaagaaaatagcctcagccctgtcccctcagtgggcactagacgtgcaacatggcagatatgggggaccccaggcagcagaatgcacacagtggcacaggaaggcagacagcatcctaactgcmctctcagccagcaggaggggagtccacagtctagttcagttacctgagggaaaccgcccaccaacccaggagttcttcctggaggagagggttctgatgtttggagagggttggcttgacaagctgtgagggacagcagttgcttcaggttttcctgcttgtgatctgtgatctctgctctcttttctctctactccaatgtgccccctccccaccaaggtcaccgtcaactactatgacgaggaagggagcattcccatcgaccaggcggggctcttcctcacrgccattggtgagttggcatggttgccgtctcagtgccttcatcacccagggcctggcactgttgtccttctctggggcacttaggcggttctcagtgcggctgacctggcacttggagcttcttctgaatggcacaggcctggggagggatgtcacatgtgccccaccccggtccttccatactggggtgggggcttatctgcaggaagaggcactccctgatccatcagcaaccccccccccaagtgtcaaggtccccttcccaggctctgtggccctaaaagagaaaaaggtgaagtgtgttyccccctgcctctcccctgcagcctggagaaragtgtccctctcatggtgaggggaatggccacagtctataaaactagcagctgttcttgacaatcccagctgccccctggttctccccagattcagccccgagggtgcagagatgcagcctccaggtccttaactcacctagtccaagtccttcatttgatccacaggatggtgaggcccagagaggttagggaatttattcaacatcacacagcaactgggtggcaagttgagtccagaacccagaattatccctgtctcaggttctctccattgcatcacactgccctgcgctgggtgccaggcctgcatgccagggagatggagcctagcctggctctacaggacccttggctgtgatcatctgaattttccatcactccaccccctgaaactgaggcattacttttatgctattttatttcattttttaatcatagaatgttaaagccaagaggacatttcagagggtcattttgttcatccaaccttggtttaacattgacagagttgccgcatggcagaggaagggaactaccagttattgagagtcaactgcatgctgagtgctttmaaaataatgatgcggcctgcttattgcaggcctactstgtgtctagagctgcactgggcactttgatgaggaggaggagggggagaatggtaaacacctgatattaattgagcacctatggtgtgccaggctccagtactcaatgttttaccgtcacgatttcaatctcttcttccaactattccaaggatagatattattattatcatcctcattttatagatgagaaaatcaaggctcagaaaaggtaaaacaaatacttgcctgcagcyacatctccagaaaatggttggtgagatgccaatcattccagttatcccacattctcagggggggtctcagaatctccccaagatacaacyaactcccgagccagccccttcckctctagccctgtgctctcagctgcttaaacaggcttagcagcagggcccttctcattcttggctaattcccaaatgggcttggttgctggtccccctgtccctctttctgtcccaaggaggtgcccagccctggggtagggaacctcgggatgaccttggtgagggtggcagatgatcaacaaagactcctgggttgtactgagccctggcacgtgtgtgaaccttgcatgcacacagcatccaggcagtctcagatgacagtccctgaggaaacctaatcccaccaagatagggacacctgaggacgggggcaggaagggcaggggcctgacacctgtcaaatgaggatgatcccagaaggctgactgcaccattaacaagacttccaccaaagcaagacagacttaggatagatggcaaaataagcgtctataaggaggcaggactggacttttcctcctcactaggagatgacaaagctgtgcttagaggaagcccgctcagagttggcggcatggctgagtcccaaaagatgccacatgtgcccacgacaagtgaccaagttcatccttccgaggtctgttaataattatttatttaactgccacaagttccagatatttagattccatgggccaatcaaatgtcccctgcccccaccccccaaaaaatgagaacactaacaactttgatgcttggcaaaaaaaagaaaaaaaaatacatcaataaaacaatttgtggccaggcgcggtgtctcacgcctgtaatcccaacactttgggaggccaaggtgggcagatcatgaggtcaggagtttgagaccagcctggccaatgtggcgaaaccacatctctactaaaaatacaaaaattaactgggcgtggtggcacgcacctgtagtcccagctactcaggaggctgaggcaggagaattgcttgaacccaagaggtggaggttgcagtgagccaagatggtgccactgccctccagcctgggcgacagagcgagactttgtctcaaaaaaaaaaaaaaaaaaatttgctatcaactatcactatcattttaactcttaaaaaataggcaaggcataatctcagaataaaagacagtcatggccgggcacagtggctcacgcctgtaatcccagcactttgggaggccgaggtgggcggatcacctgaggtcaggagttcaagaccagcctggccaacatggtgaaaccctgtctctactaaaaatataaaaactagccgggcatggtggtggacgcctgtaatcccagctactcaggaggctgaggcaggagaattgcttgaaaccaggagacagaggttgcagtgagctgacacagtgccactgcactccagcctcggcgacagaatgagactctgtctcaaaaataacacaaaacaaaacaaaaaacagaataaaagacagtcattcaattgcaaaaagaaactaacaccattgaacttctgtttcctgttccaacagagaccctggtgaaaatctggtttcccttggggaccactgttctctctgtcccttctaggttttctcttttctcgagcatctgccccaggagcccttgagcccgtcatcctgagtaatcaatcactcaggggcagcgcctcagaggcaagccccccccccaaccccaatatcttgagaggctgggactgtcccctgggcacaaaaatgtatctgaatctctctcaccctggtcctatcctgagtccacattgagcagaaagagccttggcttctgggtagacagaagtaagcctaagatctttctctgtcccctccagccagcttgtgacaagtcacatcatccccctgagccttggcttcctcatctataaaatgcgcttcacagagcagccttgcatggtgtttacaaggattcagtgggatgttgtgtgcgaagggcccggcacagagtgggtgcttagtcaatgctccgcctgcttttctctcttgctcttgaggtggccgcattttctctctgcctgggtgaagttaaagaaatgtatggtctctccttcttccttctgggatttgggagcaaattcatgattcctttggccagatcaggctctgggtctttgtcccaatcccgccaaggacttgctgtgtgaccttaacaagtaaccacccccactaggactcactttttacaaactataaaataaggggtttgagctaattaatccctaaggaccttcaagaccctggttagggttgatttgcaaagacttccattttttgggagggatgggggagagcaagaggtgaggtgtggggagggaggaagaatcccaccctatttgaggtcctggcagtggaaggagtacacatatgmgggccccagaaaattttaacatcaacctaaggggcttgatcctatgccttctccccagaggctgggatacttgccctgattggctgtgggggagggtgtccttccttcccataacatctcaagctgcttagtaaggcaagaaggccaggcaccctgccactctctggcgaccctccaaaatgcttgtgcctctcggtcagagctgaggcytcagtgtcttcattctcagggcagactgccttgaacccaatcctagggacatttcccgtcaatctgccccacacccaggagccacctgacgccttggggctattctggggaactgaggtgggatccagagcctctgggaaatgtcvtctggagcctggaggccctgaagcagagctcctctccctcctccccctcgggaaggcagagccatcccaagaggcaatgctctgggcaggtcacaccagccctgttctctgcccctacccgcagcatcccactggaatctagttaaatcagacattgggggaagccttgcaggggcgaagtcccatgggcatgactacagggtgggcggtctctgagggtgaaggggccagaaggtcatttcagtggattatggggacaggtcatgggtcatcagagaggagttatgaagccctgtgagaggctgggaggacgataagggagccacactgtgaaatgcccacatttcgtaacaggaaggtaacgaaacctgtctgaattcagtaaatcaggaaatygcaataagcrtgagagaggttgccttaggcagctgagaagaagggctggacaaggaactgctgtctttctttagaaacagtgtgttactattttatttgattttgtttgtactatgtccaaatattacatgaataaaatgtttccatttaagaattcataatgaaatgaagcagtatagactgcaccataatttctctcctagcccacggccccactgctttaatggactcrccacaaggagtcccaatgtaatgtcaccttacggcctagagacgaaggccgcagggctaccaaggtggggaaatgggcacttcctctgggaatgaccttcaagggagcaagtcttgtgtctttgactttgggctgggcttttggaaacagcttgcagggaggtcagcctgggttcattgcagggaacagcagagagcaggcagcyggagtcygaggccctgctgagagcctggctctgcgttctgggaacttcggtggtcacttccctgctgcgggcctgggtttcctcatctgtatcgttagggggtgggggtggtcacgcctccccwggagtggccgagagaacacaccttggaaaacgctgtgcagctgcagagcaggatgcccgcaggggagaaatttttaccttgaaaaggacagagtggctccctaaagaggctggacctgcrgctccttccgagggaggagtttcaggaagccagctccctgaaaggcagcattcagtggrcgtgacyggctggaaagttcacaaaggtccaggarccaaaaccagtattattcctgcccctgcaccccaggctctttaacagcccctggtggtaccgccttcccttctttcccctggggtccttatcctgcascagcctcccagattamcagcccgatttgctgacaagtggcttctctgaacctgggtttgctgccctgtgaaacgrgagcaatgctattcatctcatgggactgtggacgccttgagagcaggtgctgtgcctccattgcccgttgcctggtacagctcccggagcagtagctcctcagcagtgaaatgtggagtgaatgcgatcggagggaggaggttacaaattatgccttacagcacctaactcaccgcacagctgcagaggctgggacacacaagactgsctctctcaagggccaggcgcccttgcagcctccttctagactggaaaagtcacatgcaggtctagggtatgcaggctataggcaaagggaggacctgaatgtgatctctggactctgggcttggttggcccagagaagggtgacatcagtgcacttcgtgtgccaggaccctcctttccatgccctccaggcagagggtgtgcctgccacggggactaaccaggaatgcattcattaccacccagcgcccaccaggtccaagtcatgctcagygtgagatgagcccactcgggcagctctggggacctggaacgggcacatgtcatgtgtgtgacactcccaacaccttcccarccacatccctactcgacctcrtccgtctccaactcaaggcaatttcgcctcccaagggacatttgacaatatctggagacatttttggctgtcacractgggagggatgttactggcatctggtaggtagaagccaggagtgctgttaaacatcctacaatgcacaggctgcccccacacraagagttatttggctcaaaaatgtcagtagtgccttccattgcagctaatgcatctgctgtaaccaggaagggccccattttacargtgaggaaactggggctcagagaggtcctctaacctgcccaaagtcacacagcttataagcagagaaccagggtctaaaccccaccttgtctgatactaaaccttttcacttccctacagtctccacaaagcctgtctccatggcaggcctagggatgctgagggtcccttcaccaagagaagggataagtgggggcctggccctggatcctccatctagactcacaggtgmcctcagaccaagaggggttagagacagcttcccacccacagtaaaaccctcagtccttgaaggtgggatctagmccactggaagttctgggagagaaagagacacgcacacccaggtgcacatgtgcacacctatgcgcatgcccgggtagactgagaaaggcagtttgggaatgctatccctgttaagttttcagaatatgaactatgaatcagaccaaccgcactgtgtaccccagttctgctagcgtccctatgtgatcttgggcatgcgacttcacctctgaactgaggcatccagatctgtgcagcgaggatcattccccaacccccagccagaacaatgaagtggtaggaggtcccagacctccccgatggcagctcttgcagccrtaagctacgaggtccacacrgtgtctgctgacggtctccagtgggtagtgggatgttgaggcagggggtygcataagatgacttcagcgaggtcctctctttcccgtgaccaaatgaatggctgagacgcacccaaatcccacaggtcttcctcttgcccctgccctgccctgcctggcaggctcagcaactcacccatgtctcttctccccagagatctccctggatgtggacgcagaccgggatggtgtggtggagaagaacaacccaaagaaggtacctagctttcagggcaggcaccaccctgaacccagggcttccgagggcacagccccagatcccrcaggcaattcccatttcacagctcaggagactaargcccaagacaggctcccagacacacagcataccaatgatggaamccacagaggagctcaggcatctcctagagacrgcaacagagcaggctcctgagtctcagtttctcyatcccatgatggggacgcccaattcatggaactgctgggaagrataaatgtgcccgctacagaggaagcactgtgaaggcatttgctcttattattttgcctgttcttttaagactagggaggtgggggagacagaccctcaggacagagggtcgcattcatcattctcagttccaggcryggtattatctctgctggtgcatgcacggcccctctcctctttctatttattcttkcattcattcmccattcattcatttgttccctcrttcatttacttattttcttttatcttgcattccccactcccattctgctcccccacagaggaccattttgctgggtttaatgtgtctctttctgctctggtgactctcaggaggcatgtggtgtggttggtgtgcatgtatttttaatttgtgcagacrgcatggtgttctccaycwcattctgttttgtacttttccctcaacctagtttttaggctccatcagtcttgctctgtgtacattcaggctgttgcttctaactgctttccattttctgcccttctgtattatctcaatttttgccatgggcatatgtgacttttataataacactctgaagcctagagtaaagtatacatagaggggtacttacgaagtaaaataaacacagcctgatgagaagcctgggtcctagcagcctgctaccctgactctctgcaggtcaggagagggttctcagccatgtggggaagtcccttcttctaggatcgtgagcaaggcttgcctgagaccagggccagccctgcacactcattctctgagtctatggccaagccatatgagaatgaactccacagaggcctctgaaacccagcagccccagggcgacagcttccaacctcccccaaggggctgggcagtcttgggaaagtcacacgatccccatgagcctgaacttggccagaatttttaaatctgggccggtgaagttttcacattttcttcactcatcccataaatatttgctgagcatcttttatgttccaggagcgggtcaggcccaggggacacagaaagaacaagagaaacacagccctggccttaaggagcccatggtccacattaaatatggagtgtttcggatagctgtgtcatcacagttgtcctaagtcctcccaaaaaggatgtgtacagggccaggtgtggacccggggaagctgctctgtcctagagaatcagaaaggcctccaggaagaagagacagtcatgctgtaaccgaggaagggtagagtgggccaggtggaaaggggcaggacaggagcagagggactggcataggcaaaggcctgggagcttgagtcttttgggagcagaaaggcgccgggatgggtggggcagagtgagcgaggggcaaggcggaggagatgagacagagaggaaggcaagtttcaccaggccttccaagccacagcaaggaatcagggcttcatgccaactcaactgggagcccctgacctggcttaaagcagggaagcaacacaatctggcccgagtttgttctagtagtgctatggctgcagtgtagaaagtggagcaccatgcaggtcccattcggagcactaggagcgtgtctggaaacagctgggtggcatccatccaggcgtctcctcctgagctcccctagggacctagggacccatggtagaatgtctgtctgctcatttctctggccagcctccacctccctgcctccacccacaccagacaccagctgcaccagacaggaggcccataaatgcctcastcagccttcctgtctctgtgcctctattgaacttgcctttgatgcccacattcatcctctgtggacatcagtcttgagattcacatttgccaggtcacagctgccccagtgggtggcggctactctttaccctcatcctggggctatctctccagtgtcccatgggktctatacaagcatagagaagagggcactgacctttcttcctgccactgtaggcatcctggacctggggccccgagggccaggggrccatcctgctggtgaactgtgaccgagagacaccctggttgcccaaggaggactgccgtgatgagaaggtctacagcaaggaaggtgccagcaggccctgcacttggggggcaggatgagaggagtgaaaagattcatgcccagtcctgggctgggctgagggtgaggcaggtgtggactcaggcctcctggggatggtggacacaaattcccactcttgcttaaagccaaaggcaaaaccataggaaatagacaagggccgggcgtggtggctcacacctgtaatcctagcattttgggaggccaaggcaggcagatcatgaggtgaggagttcaagaccagcctaaccaatatggtgaaaccccatctctactaaaaatacaaaaattggctgagcgtggtggcatgcacctgtaatcccaactactcaggaggctgaggcaggagaatcacttgaacccaggaggcagagattgcagtgagccaagatcatgccactgcactccagcctgggcaacagagcaagactctgtctcaagaaaaaaaaagaagaagaagaagaagaagaataaaaagaaaatagaccagaaggaaattcccaaaaggttaatcatctctagtgttggaaatgacaactggtttttattctgttttatgctttgcttttttctttttctttttttttctttttttttttttttgagacaaggccttgttctgttgcccaagctggagtgcagtggcatgatcatagctcactacagcctcaaccccctgggttcaagccatcctcctgcctcagcctcctgagtagccaggattacaggcacatgccaccatgcgtggctaattttttttatttttgtaaagatggggtcttgctatgttgctcaggctggtgtttgtctcctggccttaagtgatccacccacctcaacctcccaaagcactgggattacaggtgtgagccacagcacccagcctctttatgcttttctatagtttccataatacacatccatggggattttttcctgattatcaaagtaaaaggcattgggaagctgaggctccagcarcagatagatctcttcattctcaccttctgtccctcagatctyaaggacatgtcccagatgatcctgcggaccaaaggccccgaccgcctccccgccggatacgagatagttctgtacatttccatgtcagactcagacaaagtgggcgtgttctacgtggagagtgagtgaycccagcccagyccagcctagacctttctagccacctaccctcctccccttagcagttgtggccttcacaggtgcaggtgcctggggaagacctggattggtctctgagtgattgtaacatggcaatgctgttgtcccgtgaagttgaaagactccatggggacacatcgctcctcctctcaaaggagtctggagtgacatgggtctatgtagaacccagaggcccttcctccctacgaatcaggggaggaagggcatttgggcacttcttttctggagtcatgtcaccttcaggatacctgaggcagggcaggcaccacctccaggtattttctgccatctctgactttcaaagaccccctaaagatgcagtgggcacccttgaagagttgaccccttgctcctctcgatggcaacagatgtcctgggcccccactgtgtagggcacgggctcctgccctggagctagtcctcgtagctgccggctctgcctcaccctgtctgtggatatgtgttgagccctttggtgccaggccctgttctcagctttgagatctctgcagtaaacacaacaatcacaccctgccctcaaggagccgccagtctagcaagagagacataatcagtaccacaattggaggaaatgaaatagaataagtgaggagaatggcagggcagaggcaccactagatgggtgcctctgaaaaggcctctctgaggaggtgacatctgagctgagactcagatgaacaataagaaggaaccagccactcgtgagctgagggaagagtgttctaagcagaggcaacagcatctgcaaagcctggaggaggagaccagtttagagtgtgggaagagcagatggaagcccagagcagggctgggagtcaaggtcagtcagctcggccaggggccagagcatgcagactgggtttgaattttcttctgagtgcaatggaatgccattagagggttttatgcaagggactgtcataataatgatgtatgtgttttaaaaactccctcagcaaaatagtcggcattgcaatttgccatggtacaaggcgggtcgtggggtggcgggaggaggcttctgcatgcccagctgcctaggggggccaggatctctggcccagccccgaacccacctctagacaggcctactagatccagggcattcaccatgaggtgagtagggaccctggaccctcacatcagggagatatttagccaggatggcagtggccagcagccacccaataccagtcttccttctgatccaccctgggctccaagcagtgacctcacacaggttggaatgtgcccagagtcaggctggctccgctgccgcagggggccggagatgttgatgttgacaccatccaggccagggttgtcatggaggatgggatcaccagtgggagcaggagggatgcaagcaggacctcaacctcggcctcttgaccttggtgtcgtgacacgagacctgttgcaaataatgatgtctggacattatctagaagtttcttctttttgctaaagggagtggactggtctggttccataatctcatccctccycrtcacttgccatctgagatgggtcctgagcagacaagaaaaaagaggaactactaccacargggctttgagaacgtcccttggagcctcttatttgggctgcccatcctgtggggagcagccacgactgagacagtggggacccagaagagacagtttcccaataatgctgacactgggtcactgggtgaaaactcttagacacacacacacacacacacacacacacacacacacaagcaaaggacgacagataattgaccaggagcacagtctctttttcttccaggcaaacactttggagttatgtcaaattccaggcacccctgtggatgagcgaatgtcaggtgtcctggtagggtcagaccagctctccccaaggccagggggctgggttggagactgaaggacccctatagggagtgctggagtcagggagctacaattctgggtccaggcaagtcttctcaccagccccagccttggggtgctcatctctgacgtggcatgggartagtaagagttccgactgtcccgggtgtcccggatcgtggtggggatctaatgaggaaggtgtgtcaggcactgagtgcagtagctggcctttggaaagctctccataaatggcaattatggcttttgttgagattatgatgatgactgttagttacaatgattggagtggacagaaggcttcagtgctcctaggaagacctggtrayggccttagcctcaaattctgcccaaaacaccaagcactggggccttacctctttatacaaggaaatggtaatccagtttgcccaggactttccttattttagcactgagggctcctcatgccaggaaaccyctcagtcctagggaaaccaaatcagctggtcacactatcaaggagtctcgctgggaagtggaatcattccaaagtagctagaaaggttaaggcaaaccacgtgccagccaatgcctggggcagagaggtcacggtggtcagtgggcccagcccaaggcacgaggaccactcaatagagcggcattgttggttcctgcagagaaagctggccacgctcagtgtggggtttgcaccgagccagggatggaggacggggtaaggaggctcctggggacaatggctgaattgttcccaccaagaaatcagtccgcccggagctggccccaactgtcagaaagcagcccagaatagaggtrcattgtgaatcacaggccacgggccacatcgggagggagaaagctgccggcagacggactagaacgtgtcctccacctgccccaccacccctggccagatccctgttcctaccccagaccttggtggagccccccaggtgctctgagccctgggaaagctttggctgtgtggcttctgccaggacaagttggcttctaagcctgactgtcccctgagcatcagttcaagtgcagcctggggcctgtgggcatgggagggcccgagtgcctggaggaaaatgttttcatgatgccagtctatctgaawctactgactgacagggctgcagggtgcacactattgtttctgggtgagcaggacctcactttctattctttgggactttcagtatctgaatttttccacctcatttcttggactcctccctcccaagggaggatgaggtgggaygtggtttccctgccttctgtttggaaactattcaatgaaaactccttcacatcctcgtaatacaggtccaagcagtgttactgatggttacccatggttactgaggttactgaagttactgagcctgtgtcatttacattgaacctgtggcgtgggtatcattatctcccacttaacagatgagtaaactgaggctcagggaggttaagtgaattctctgaggcttggttttttgttttttkttttttttttttttttgagatggagtctcgctctgtcgcccaggctggagtgcagtggtgcaatcttggctcaccacaatctctgcctcctgggttcaagtgatattcctgcctcagcctcccgagtagctaggattacaggcacgcaccaccatgtccggctaatttttgtatttttagtagagacggggtttcactgtgttggccagtcttgtctcaaactcctgacctcgtgattcgcccgcctcagcatcccaaagtgctgggattacaggcgtgagctactgcacccggctccctgaggttttatagcttgtaaagccagagaagtatttaaaccaaggtccctctgacattggaagtcataaccactaagggaagcacccttagtgagatttataaccagggtctatttcggcacattgtcccacaggaggagccatcccaagccctggcttcgcggttcatccacttatttctcacgttttaatcaagcacctagtttgtgccaggctattcggcttatgtgttctaacccttgagcatctggtcattaaccattatcattgtcgttgaaagcactaagctgaggctgattctgcccttccagctctacagggcataaagaaattccttctggaactgcatagggtcctacctccatgcctttaccaatgcaagtatctcctctccccaacacacccatttctgccaacccgcaagggcatctcaaaggctgccttcctctgctcaaatgcttcccaccgtgcctcttctgccctccccaccctaccccaagtaaccagactggatctcacccatagccgccgttatgacgcttcccacatctgctccatcttatcatcagctgagcactgctgttacagaggctgcatttggaccacctctgtctccccgaaggtccttgcctgattcatgtgctctcaatctgcctgaaaattcccccttggtctctcccacagggaatgttgtgggagtcattggttcgttcagtagacatttgttaaacatgaccatgtgccgggcaggccctgggccccactgggcctgtctctaccctcgcacaggtcacccacatttaaaaaggctgtkatgaggccgggtgtggtggctcacacctgtaatcccagcactttgggggtctgaaggcaggcaaatcactaaaggcaaggagttcgagaccagcctgaccaagatggcgatgaaaccctgtctctgctaaaaaatacaaaaattaaccatatgtggtggtgggcgcctgtaatcccagctacttgggaggctgaggcaggagaatcgcttgaacccaggaggcagaggttgcagtgagccargatcatgccactgcactccagcctaggttacagagcaagaatctgtctcaaaaaataaataaataaataaataaayaaacaaacaaacaaacataaaaagactgtgatggagatggcaggtggctgtgggagctccaaacagagcccctggctttgtctctggggaawctgggctggattgttgcaagtgacacaaaccaaggcctgaaggaagaagggacacaattgtttcaggcagaggggagagcacaagtcaaactgggagctttcaggagggcaggagccctggaggaacctrtctttccgcccagccacaaaaatgaacagcccatgcactggcctttacaccaacacggcttccatgatatggagggaatttttggtataatgggcacatttatggtttgtttatacagaggggatgagagctcgggattcagaattcgacttgaatctgagtcccagctcagctatttactggctgtctgactttggacaagccactcctcctttctgagattggtttcctcatctgtgaaatggaaacaattacatcctcccctggaaccactaactgctcagctggcaatttcctatcagcygttcaygagagagcttgcttattttatagatggggaagccaaaagccagagagggtgactgtctggcaaagcgccacacagccagcacacagcagtgctgagacaatgacaatgacctagccatggccattctggtggcattttctgcttgtgcttttctctctgtctagaggacaagttactttgcccttttgtccccatcggtgatcccaccccaccgacctctttctgatgygggtgggagtctgacgttggtccttttccctccagacccgttcttcggccaacgctatatccacatcctgggccggcggaagctctaccatgtggtcaagtayacgggkggctccgcggagctgctgttcttcgtggaaggcctctgtttccccgacgagggcttctcaggcctggtctccatccatgtcagcctgctggagtacatggcccaggtgagggctccaggcctccaccacagggggctaaccccaggggccagggtgggtctcctactagtgggccattcctatgctatgctccaccctgctcaaagcgccaaaggggtgggtccaggctaggagacctcgatgccccccagcaaagcctgcacgtgtctgccagggtcctctgagccatgctcctgggatcagtctccttgctgcttctgctccccacggattccctgtgggcaatgtttyctgacacactccacgcctgtgtcctggcctgccctgctccctgcctaggtctaaggcccagagtcctgctgattagcgcgaggctctaagcagccacccaggtggggtttgctgaccacctactgcgcgctctgtacttcctgccccactctgacccctcccccaactgtgggttataccaactctgactgcaggctgaaccccaaatcccagtttcaggttgtgccctaccctggggccaggcatctcagccagccttgctcttgctytggggagaaactggatgaggagaagaggtcctgtccctctagagaagcccccatcactgagggcgtgctgtgctcacaagaatctctatcacaaagacctttcatccccagaccctagcctctcaggcccaccctgtttcgctcagaaaaaaagggarggacctggctgctctcgcaaacacaagagcccctcatttttatccccaggccactttgggaaaggatacaatgggtgctatagaaaggtgaggctggatctagctgagatgtatgagaatgagccctggcagccgactgcccaggttcaactcctggtttaaccaccacgagacactaggcaaatgaattaaacttcctgttaatttccttagttaagggtagtttgccatagtttctccatctgtaagacagaacgtccaaaagtttctgctgccgggggtggttgtgagcatccaaacttgtgaagttctacttacaaagcaccctcaagctccctgggaagtggaaaaggcaaagctaacaggataggggacggggatggggcttcttatggcacccatgcccagggcagcctgacccccaggatctctcaggcacccgcagagactcaaaaggcagaccacggcaagcaaggcaagccgtgcaacagtcccaccacccccgcacctccccaccaaggatggggtccatttcctatatcttttgaaagccagccccacaaaggaaccctggaatcagacctcactttcccttgggttccaggcaagctgcttgaccattccttaaaacaaaacagtctggacatagcaaaactgacccaaaacaacgcgaaaatgcccacatacagaaaacggcaaggtgccaagggcaaaaacagaggaaggtggggggctggctcagctgttgcgtggggcgatttcaggaagagaagtttgatgggacaagataggacagtggttaagagtgtgacctcagcagctgactgcctgggtgtaaagcctaccatgtggtcaagcacacgggtggctctaccacttaccaaccatgtgaccttgggcggttaacagccctgtgactcggtttccccatctgaaaagtgaggatcatagcagtatctacctcctgcggtggtcggaaggcagaaaagaattggcacatgtgaaagtacttagcacaggcttggtgcatagcaagtcctgaggaaatgtattcactgtcatcagtttcacccgctttgaaaggcaggcaaagaaagcacctgacaaaaccttttgatcccccacgccttgtctcycacacccaggacattcccctgactcccatcttcacggacaccgtgatattccggattgctccgtggatcatgacccccaacatcctgcctcccgtgtcggtgtttgtgtgctggtaaggggtgaccccagcctggagaggcagcgtggcagagtggccaagggccgagtcagatggacatgagtctagttcctggcycygtcacttaccactgtgttaccttgagcaactctcttggcctctctgaaatgcccacatcgtagagtcactgtgagaattaaatgagatgaagcaggcaaagcatttatccaaggcccagcacacagggtatgctctaaaaataatagctgccattctgttctcttgcttaaccctctaccaggcagttagcaacctcctatgcagtggaaatgcagctcatctgactcattcattaaacagacttttattgaccacctattatgagctaggtccacaacagcaagatgagaaccaagggaaaaagtgcctgtgattagatggctagcaacccaaaagggacccttggggtcctcacgtccatcccatcttcatgccaggcagagctcttctttgaaaatctgtggagtcagaggtgtaaggcattgggacaggtgggggtgagagttcccyccctcattttatttgttcatgaccttgacaaacgccacatgagtgggtgggtttacttggcctttgattccagcggcctttataaaggtggccgtgagcacaggtgtagactgatctgcccggcacagcccagagataccagctgctgtcaccatctcagggagatgactctggcccctcctcaccctttctyctggcctctccttcttcccccaacttctcagcatgaaggataattacctgttcctgaaagaggtgaagaaccttgtggagaaaaccaactgtgagctgaaggtctgcttccagtacctaaaccgaggcgatcgctggatccaggtaaggagcccaggtccaggctgggaaggacatggcccccgggtcaagcaaagaagagttggcttcatgtgaactgcctggmacccagcagctctgcagatggggattcttctgtcagctcatatctgcacatgtgcacaaagacataaacatacaagtgcactacagtgctgcttcttgtagtagcaaaagattgcaaagcaacctaaatgtccatctgtggaggactgagtaacggccttcccggaagttctgtgcaaccgctaaaaaggatgaagccagtctctcaatatggatacaggatgtgcttcaagttaagttgttactcaacggaaaacatattcaggatgctgcttgctatttgtgtgttttgttttgtttgagacgaggtstcgctctgtcacccaggctggagtgcagtggcatgatctcagctcactgcaacctccgccttgcgggcttaagcaatcctcccacctcagcctcccaagtagctgggactacaggcatgcaccaccacgcctggttattgtgttttttaaaatgaggtctaggccacgcgtggtggataatacctgtaatcccagcactttgggaggctgaggtgggaggattgcctgagaacaggaattcaagacatgcttgggcaacatagcaagaccctgactccacaaaaaaaatttaaaaattagcctggcatggtagtgcacacctgtagtcgtagctactcagaggctgaggcaggaggaccgcttgagcccaggagtttgaggctgcagtgggccataatcatggcactgcactccagcctgggcaacagagtgagaccctgtctcaraaaaaaaaaaatggggctgatatcggtaagaaacctgcctgtgatgtgcagagactgcctatggacacctgtgctgccatcatcagtgtgaggggaggaggatgggggaccagggaatggggaacaagacagacgttcttyttcctttgtgctcttgtgtttctcgagttttctgcccatgtgcacaaattgtcccctggattcgtctaacagttctccttggtgtccctgcaggatgaaattgagtttggctacatcgaggccccccataaaggcttccccgtggtgctggactctccccgagatggaaacctaaaggacttccctgtgaaggagctcctggtaagatgctgagggccacttgygggtggagcatgatcctggagattctcataagacagagtggtcaggagaccctgggccgccttgacacattcatctgctgcccagagcctctgtttctcctctgcaaaatgagtccacttgggatagctgcctctgaggtcctttcctrctctgataactgatgtttttccaaaacatagagagttttctagtgggaaatgggaactaagggaaatagagttaagacctagttccagaggccctggcccctgctgctgcccttcccctccaaattgcagcaaaatgagttaagtttcaaagaggaaaaaaacatagttatgcaattgtcaaaagtcatggttccaacttccaagttcatcagcactttgaggctatggtttttggtgcgtgtgtrtgtgtgtgtttgtttttgttttctgagacaagagtcttgctctgtcgcccaggctgaaatgcagtggctcactgcaacttccatctcccaggttcaagcaattctcctgcctcagcctcccaagtagctgggattacaggcatgcaccatcatgcctggctaatttttgtatttgtagtagagatggggtttcaccatgttggccaggctggtctcraactcctgaccccagatgatccacttaccttggcctcccaaagtgctgsgattacaggtgtgagccactgtactcagccatgttttttgtttstttgtttgtttgtttgtttktttttaagtcatctgactcctcccattctggaagccattctcagtccccttttaggcccttgacaacctagtgtgtgargttagaaccgaaaccaatctttcttttgtctgcactcttctgccctgaacaggctgggggaggtttgaacagggcatgaaacaagagactggaatagatcaggggacttttcccaaggtcacatgcaggacagcattcctgtcagacgccagggctgcccagagctgaccctgtgccaggttcacacctgttctgccccacattccttacccagtgccctgttcacaaggagatgctagagccaatggtgtcagcacagagctttggaatgtcaggtggacccggtcttgagtcctaattgcacctcttagcagccatgtgaccttgggcaagcaattaccttccacgagcctcagtttcctcatctaaaatggggatagaaatgatatcagtctcacagaatgttgtgaagattgaaggcgttgtataaggcatcagtgccatgtctgatataatgaccattattagctgttgttatggttatcattccccgggccctgtccttagtgagcttattgtccactttccctaacactatgatgagtagagtcaaaccaaccaccagmaccagttgccacaggcatgagaagcgaggcctttccaggtcaccacctgccttcagtattccaggctggcctggttccaaggccccaggctgcgttgttccttgaggcccaggccaggccyggctttgtgctgcatacctgcccacctgtatggtgctgcagagccccagcaccccagccttggcaagctcccatgttgccagctggggccccaagatgagaaagcactargctgctgccatctaccccatgggctcagctgtccctggagcctctcagctgagccaggataagccacatcctccgactccactggattttgtmaggcaagcttcatcccaaccccagtgcaagctcccaaacaagattcctatatttgtaccccaaaagccatgagaggaatgttaaaattcaggggccaatggggttatgwcttgygkgctaactccaattttttggagctctgtgtgaagaagggttctgaggcttcctctgggctcagtggcaagtctggcaggttgagactgggttgagatgtcatgtatattcatagctgccacttttgcatgtattggtcagcttcaccaagtaacaaaccaacccgaaatctccatgaccgacaacagcaaaggcctgtgtcttgctggcattccatgttgattgytgctggtggtctgccactctgcttctttatgycttccttactctagcgctcaaggtgccagagcagccccagtctgggaaatgccattctcctagcacagggagaaktcaaagagttggcagacacacgtgggggctcctgtggcttctgctgttcactggcatgcatcccttctgctcacatttcattrgccaaagcaagtcacgtgaccaagtctgacactgggcagggaagtatattccttttgcaggaagatgccagaagtcacatggcaatgggtcaggatgcaaaattctcttactgcgcagagggtagcaaatctctggaaataataatactagctgctccccttcctcaggttacctaatctggtaactctcttatagatggggaaacgggctgrgcgcagtggctcacccctgtaatcccagcactttgggaggccaaggtgggtggatcacttgaggtcaggagttcgagaccagcctgggcaacccagtgaaaccccatctctactaaaaatacaaaaattagccaggggtggtgcttgcctataatcctagccactggggaggctgaggcaggagaatcacttgaaccaagaggcacaggttgcaatgagctgagatcatgccaccgcactccagcctgggcgacagagcaagactccatctcagaaaaaaaaaaaacaacaacagatggggaaactgaaagtgcatagcataaaatgcggactaattctgaaatcaccaatatgtatctgtgcttgggaaatagaggcatacacaggaatgcagatgcccacacactcacattcacactcacactcactctcacactcactctcacactcactctcactcgcactctcacactacaccgagatgctcacacactcagcctccccatgcccaggcccctgctctttgttaatcatargaagaccgtggacaacccacctgraaactrggtgcccacagacccagactgaaggtgataaaagagggtggctggcttgggggctgaggaccctgrctgcagaagactaacgcaggtgtgtgccctctrcctagggcccagattttggctacgtgacccgggagcccctctttgagtctgtcaccagccttgactcatttggaaacctggaggtcagtcccccagtgaccgtgaayggcaagacatacccgcttggccgcatcctcatcgggagcagctttcctctgtaagagaagccaggctggggctaggggctgtgggagtggggaagtcactgtttctcttttggggtggcctgggttgctcacacatggagcaagtggctgggggaattattccctcccacgacttcctgttaagaggccgacactcttggaaagaaaatcaagctagcctttatatctttgtgtgatttaggatctaatatataactaaataaacaactcttttccccaagtggaaaggtgtataatgagattataaatcagctggttggtggggcacggtggctctcacctgtaatcccaacactttgggaggccaaggtgggcagatcgcttgagtccaggggtttgagaccagcttgggcaacatggcaaaaccctttctctacaaaaaatacaaaaattagccaggcatggtggcatgcatctgtagtcccagctactcaggaagctgagatgagaggatcgcttgagcctgggaggtggaggttgcagtgagctgagatcacaccactgcactccagcctggcaacagagtgagacctcatctcaaaaataaataaatagataaataaataggctgggcacagtggcccatgcctatagtcccagcactttgggaggccgaggcaagcagattgcttgagaccagaagttcgagaccagcctggacaacatggcaaaactttgtctttactaaaaatacaagtattagcaggcatggtggtaatcccagcttcttgggaggctgaggcatgagaattgcttgaacctgggagccagaggttgcagtgagctgagatcatgccctgcactccagcctgggtgagagagagactttggcaaaaaaaatcaggcctggtgcggtggctcacgcctgtaatcccagtactttgggaggccgaggcgggtggatcacctgaggtcgggagtttgagacctgcctgaccaacatggaaaaatctcgtctctactaaaaatacaaaattagccgggcgtggtggcacatgcctgtaatcccagctactcaagaggctgaggcagaagaatcgcttgaactcaggaggcagaggttgcagtgagccgagatcrcgccattgcactccagcctgggcaacaagagtgaaactgcgtctcaaaaaacaaaataaaataaaataaaatattaaataaatcagctggggaagggatggaggagtccagagaaggaaaactgacaggtatgagtgggagcgtaccaatgaatcctcagggctaccatacttaaaagaggtatgagcagacgtggtcctgccccagaaatgtgagtccctggctccctggcctgtccatgattctcctcactccctgcccagttgacccaccagccagtgaaaagacagattcttccttgtcagggcagtcgctggggaaagagtgaataccttaggttctcacgtcacaaaagggctgccaggagcctgcacagatggggtcagccaggatttggccgccagkttcctccgagccacatgggatgctcagccttctgcggggaggccactggcacagccagcgactgtttgcccacttttgcctccttctccctccactcagtggccactcattcactcagcaaccatttcctgagcaccagccaagtgccaggccctgtgtcaggcacagggtcccaaacaggaagcccagcccctgccttcaaggagatagcagaggtctcaggcatgcaaatagaccctgatgaaatggagggacttrcaacgatagaaagaatracagggagtcaggtcagcccagggagtggccctgaaccccctcgaggagctcaggggsggcccttaaagacaaatatttaytgagaarctactctgtgccaggcactattctaggctctggggatacagcggtgaccagaacagatgaagtcccagctctccgggagtttatagttgggtaagggcagtacagaaaataaacatggaatcaagtaaatcaattagataattctgaatgctgatacatgcaatggagaagataaaacagggtgacatgataaaacattcctggggacaggggtgccttagctgttgtttttttgaagatgtgactagagttgaggcttggatgttaagaagtaggcagccatcaggagattgtaaaggaagcgcattccatacagaaggaacagcaaagggaaaagmcccaagggatagcaagtgtagcaggtggctggagcagacagaaccgggggaagggagggaagcgagggaggaggtcyagccaggagccagatcagaaaggaatttgttggccaccctaaggagctagggttatcttcggaggataatggagagattgaagaccttggggggtctagaaatgaggaagggctggccgggagcggtggctcacacctgtaatcccagcactttgggaagctgaggtgggcagatcacgaagtcaagagatcgagaccatcctggccracatggtaaaaccccatctctactaaaaatgcaaaaaaattagctgggcagggtggtgggcacctgtagtcccagctacttgggaggctgaggaaggaggatcgcttgaaccagggagggagatattgcagtgagctgagatcatgccactgcactggtgacagagttagactccgtctcaaaatacaaaaaacaaacacacaaaaaaaaagaaatgaggaagggcttcctggaggaggtttctcttgaactgattaaagattaaagtaagtccaggcacagtggctcacacctgtaatcccagcagtttgggaggccaaggagggcggatcatgaggtcaggagttcaagaccagcttggccaacatggtgaaaccctgtctctactaaaaatrcaaaaattagccgggcgtggtggcacacgcctgtagtcccagctactcaggatgctgaggcaggagaattgcttgaacccaagaggtggaggttgcagtgaaccaagatcatgccactgcactccagcctgggcaacatagcaagactccatctcgggggaaaaaaaaaagattaaagtaagtagaagttaatgtagcaaagaggcacatggatgagggcagattttggagccctcctgcgccctagccccgtccggcaggccaggtgggactcccrcacacaaaaggtagcctctgcacactcactggcaccctcgagggctgaagcctgggctccctgcccttcacacaggccgcagctgcaactcacacctactctttcccctgggactcaaacgccttactgcctgcgccagggtctcttaacccaacctagtctccttcctgggacttctctgctgaygycactctgggtccgaggtgggtcccagagaccaaactcctcttgsaggccctctggtgcggtgggtaatttrctgaaactcctcttcctcccttctccaggtctggtggtcggaggatgaccaaggtggtgcgtgacttcctgaaggcccagcaggtgcaggcrcccgtggagctctactcagactggctgactgtgggccacgtggatgagttcatgtcctttgtccccatccccggcacaaaggtaagctagcctccygaggctggagtgaatggggtagcrgcaaaccaatatattaccmgcccctgccagcagagggcaagagctagaggaactcgacagcataaaggaaggaggaagtaggctgaagctggtttgcatgttgttgctgtggcaggtaaaattttaaccccataaatccaaaatgttagcattgcaacacataatcagcctaaaaattattaacgagagatttaaattcttttctcatactaaatcttcaaaatctggcaaagattttactcacatgacacacctaaattcagactagccacagctcaagtgttcartagtcacataaggctagtggctattgtgttggyggtaatgctytagagagaaataggktatgcacctgtggcactggaaagaggttctttcattttcttatgggtacracttcataccctggaaattctctgcaaattgtgtggctgcttggcaacttggagatgtcctgtccaagtccacctttgactctgagccttgatctggtgacattgctgaggtagaggaaaggtgagaaatattcctctgaagcagagaacaccctccccgtcagcctttgccactcggcatgggaggcctgaggcaatgagcaggcaaggcactgggtcctcagcgcagggcctccccgtgctccttgggtgccttcccactgctgactctgtccctctggactgtctcttgcagaaattcctgctactcatggccagcacctcggcctgctacaagctcttccgagagaagcagaaggacggccatggagaggccatcatgttcaaaggtgagtggccacagggccttgacaggaagtggcgagctggaggccccagagagaccctcgggagggtrgggcagataagcactttgtccctgagcacccagctccacttccctgggtgtctggcccgatcgggggtttgtgaggtcgccatgctgggaagcacctctggcctcctgtgacccttgctgtggctgggtggactgtgagctgcccrcagctccttagtgtcaccagcagtgcayagcgcatcttcaagycctagcgtatactttaaatggcaccagacccagtggagggttaaatggttgaaaactgacatgcagctgggtctggtggctcatgcctacaattccaacacctttggaggctgaagaargaggatcayttgagtccaggagttcgagaccaatctgggcaacatagtgagagccccatttttataatactttttttttttttttttgagacagagtttcgctcttattgcccaggctggagtgcaatggtgaaatcttggctcactacaacctccgcctcccaggttcaagcgattctcctgcctcagcctcccaagtagctgggattacaggcaggcaccactatgcccagctaatttttttttatttagtagaaactgggcttcaccatgttggtcaggctggtcttgaactcctgtcctcaggtgatccacccgcctcagcctcccaaagtgctgggattacaggcatgagccaccacacccagcctctctataataaaaattttgaaaaagaaaaggaaactgatgtgcaatctgcattcaaggagcttgtattttagaaagagagatagaaaatagatgcaatacaatttagggacaggaagaaaagtggactttagtgggcaaaaggcatggtcagacatcgtggttgtcagtccagaagtgagacattatcttctacgtttagacattcacataattgggacagacatagtcgggatgaggtttgcatttgaattaatcacggaaagagggaaagatgatcaggtggagacaaccagccaggttagagacaccatgccaattcctcatacttcttttttttctttttcaacttctattttagatttagggggtacatgtgcaggtttgttacctgggtgtattgtgtgatttggggtatgaatgatcccatcacgcaggtactgagcatagtagacaacagttagtcattcaactctttccctcctctctccctccccactctaatagtccccagtgtttgccattgccatccttatgtccaacacgttttttattgtgataaaatatacctaatctaacacatttgttattttaaccacttgtaaggacacagttccgggacattaaatacatctacaatgctgactaaccatcagcactctctatatccgttatacttttttttttttttttgagacacagtctcactctgtcgtccaggctggagtgcagtggtgccatctcggctcactgcaagctccgcctcccaggttcaagccattctcctgcctcagcctcccgagtagctgggattacaggcgcccgccaccacgcccggctaattttttgtatttttagtagaggtggggtttcaccatgttagccgggatggtctcaatctcctgacctcatgaaccacccgcctcggcctcccaaagtgctgggattacaggcgtgagccaccatgctcggcctatttttttcttaaattacttttgtcacttttcaggttggtatccataatatatctcatgcctgaaagcctgagttcccgcagctggctgatacttacatgactgcccctcagatccaaagacagtgttcctgactgtcactggtgtctaggacagacaagaccaatttaacaccaccaccctttttaaattccccacygatgggaagtttgttcttggattggcaagcttgagtcctgacttcctggaggcttcctctctaatattaaacataccctcaaaaactacccataggatatagggaccattatttttgtacaaataggggcaagcagtgccccagatttctctttgtattttagaaagagagatagrgagaaaatagatagaatacagtttggggacaggaagaaaactggactttgatggacagaaggcatggtcaggcatcgtcrttgtcagttcaggagtgaaacattatctcctggacttagacattcatgtaattgggacagacagagagaggatgcgcggatgtgcagtcagcagagagtagaagcacataggagacctggggaggaaggtgaaccaggcaatgccaaagagccaagatctccgctggaccagagcccacaatgtttggggaaaacacatccctttaaaagatgataaaaactacagacttgccctccagaaaaatgcttatatcaatctatctcctgaacttggatcagttttagaaaatcacagatccctaaagttttctgtttctacctggaccytcccttctgagtccctaagcctcaaagattacatccggcttgtagctgggcatctttrctgctgtccagttataaacctgggaagtgcaatggacyagcagkctcttcccagatgaggccaaaataaataaacaaataataggttaagagcataggctctggaatcagactgcctgatctgcacaccaactctgccgcttgctagatgtaagtcctgagacaagtcacataacttctctgtgcctcagtttcctcatttttcagggtagtgactaccccatagaaatgtggggaggatccatgagttaattcaatgtaaagcgtttagaagagcktcggccacatagtaggtgctcattgagcattaggcattactaatcaagctggaagccacataagccatcgtgtggtacaggaggmaracgcaggccactccagagcagcagccaagatgaggcagctctggaaaacaggaagggtgtcccctttggccatgctgcttctgccacattcatgctggtcagctgctcatccttaggagyaggctstaggtgggagaaccagggggctacttgtagcacccctgatcccactggccaaagcaagagcaaggcagctgccaccactgtcctggctcagatgtcatggtcaactctggagaaaagagtgtgtgctgccctccccagacagaggggggcctgattttgcctgggagtgccctcctgtgatccagcctctccccagtcccatctccccagtcccagtccagcagttagcccrggsctggaggatcttggcaaaaggggaacactcagcctgggtatctaaagcttgaccatcccctgtcctttgaaccccacaggcttgggtgggatgagcagcaagcgaatcaccatcaacaagattctgtccaacgagagccttgtgcaggagaacctgtacttccaggtgagggcagggcaggggtgcagggccagagggcccctgggagggatgaggctcaggcccttacatccttggggcttccgtagagaatggccaagggctcaggagctcctgaccccgagcacagcagcacagggaagagcctccaccagcatccagccagcctccttgctttgctcctgggctaaagtcccagggtkaaagaagtgccaaattgtgccgccccctcacttggggaggtaggaccatgggcaactcactaaggctgtctttgggtctctcatctctaaaaaggggataatgggggccagacacagtgtctcatgcctgtaatctcagaactttgggaagccaaggcgggaggattgcttcaggccaggggtttgagaccagcctgggcaacatagtgagacacttgtctctacaaaaaaaataaataaaaactttggccgggcctggtggctcatgcctgtaatcccaactctttgggagactgaggtgggcagatcacctgaggtcaggagttcaaggccaacatgcccaacatgttgaaaccccatctctaccaaaaatacaaaaattagcctggcgtggtggcaggcgcctataatcccagctacttgggaggctgaggcagaagaatcacttgaacccaggaagtggaggttgcagtgaaccgagatcgtgccactgcactccggcgtgggcaacagagtgagactcagtcttaaaaaaaaaattaaaagggaataataatagcatctatattacagggctggagcttaaataggcaatctatgtaatgcgcttagaacagtactaagcacatgtacgcattagcttttgttattaccaaaatcatcagtgttatcctcagctcatggggtggcccgaggggtcactgaggtgctgtgtgggaagcacttagcacagggaccggctctagtgagtgctcaggaaatggcagctgctgttctggcatctgtgaccttcctctgtcctattacgactgctgttcatgaacccckgtggacagggccagggagaggctgcagaggcgcccgctgactgctagaagtctctctggagtgccggggcccctggcctggtgctgcagacagggatggggttgacaaggtggccrgtgtgtgtccccctcacctgcatgccctccatcctttctcctacccagcgctgcctrgactggaaccgtgacatcctcaagaaggagctgggactgacagagcaggacatcattgacctgcccgctctgttcaagatggacgaggaccaccgtgccagagccttcttyccaaacatggtgaggccctgcagaccccaaccctygccccatgccagtacagggcagccagatccagaaggacccctcagctgaagctgtccartggggaggcccaggtcccaatcctggctgagctgctgtgtgacctcacctcaggcacttgccctctctgggcctccatttcctcctaggggtgatatgctcatcctagctgcttcactgggatactgggaacccttttccttaacagataggaaagtgctgtgcaaaagattagaagtcctttatgtacaggagggatttctgttacatagaggggagtcttctataacataaaaagaggttagaacaatacatatgcacacatggacacatatatacacacatgagcacacataaacacatgtgcatgcatggacacatatayacacacacatgcacacagaaacacacatgcacgcatgaacatatatacacacatgcacacacagaaatacacatgcacacataaatgcatacatacccatacgtgtgtgcacattcatacacatgtacatgtacacactgatgcatgcatatatagccacrtatacatacatgtacagacatatgtgaatgcttttgcacacacatacatacagaggcagattgcctggttttccacttcagctctgccatttgtgagtgacttagccccactccgtccctatccaatcacagttactacttcacagggttgccgtgagggttccatgagcttaggataggcatgtgtgtactaggtgctcactaaatggaagctgttgccatcgcaatcccccgtcacaggtgaacatgatcgtgctggacaaggacctgggcatccccaagccattcgggccacaggttgaggaggaatgctgcctggagatgcacgtgcgtggcctcctggagccyctgggcctcgaatgcaccttcatcgaygacatttctgcctaccacaaatttctgggggaagtccactgtggcaccaacgtccgcaggaagcccttcaccttcaagtggtggcacatggtgccctgacctgccaggggccctggygtttgcctccttcgcttagttctccagaccctccctcacaygcccagagccttctgctgacatggactggacagccccgctgggagacctttgggacgtggggtggaatttggggtatctgtgccttgccctccctgagaggggcctcagtgtcctctgaagccatccccagtgagcctcgactctgtccctgctgaaaatagctgggccagtgtctctgtagccctgacataaggaacrgaacacaacaaaacacagcaaaccatgtgcccaaactgctccccaaagaattttgagtctctaatctgacactgaatgaggggagaagggaaggagattctgggattgccagttcttccagcagccatgctctgaaaatcaaggtagaatccatggaaagggaccccaggaccccgggaccctagacgtatcttgaactgccatcgtcatttcaaatacatctccctcagggtttccaggtggccacccccaattattcattccttaccaacctctcaaatcctcttggctttctctctgcagtgtggacactgttggctagtcctccccactccctgagggtccagtaagttagcttagaaccttcctggaaacatttcatctgagcaggtttccccacgtgtgggatgctccttttgcctcatctgtctcagggatgcaggctcccccgcatgcatggggatttctccccagaccagcatacttgtgacctgagagttcaatgygtaaagatgcccctggtcagccatatccatcttctcttgcctggtccttgattctctggccgctccctgaccttcctccttccactgccttgactttcttcctttttattcctggtgccatctgtccaggcagctagacaagaacttgttcrccagcagccrgattcaggccttcccaggggcataataagtgaccagcccctcctctccggacatcagatccaacacataaggaccctggcctaccctccagcccaacagccagttctgggtcagctgccaacttaggggtggtttgattatcccattgaaattcaccagtgcctttgccaaagaccctctcatttggacatacccagattcattccctggctccaactgaaaagactcagtttcaatckttaaaagttcctttagggccagaagaataaatgaattataatcccattttgaagaaccgatttataaccaatgaaaaggttataatgtaatttatattcttggaggaacaagattttcatttgggattatttccttcaaccattcaacaaacatttgttgtatgccactaagcgccaggcacggcgttgggctctgcaaacacagtggttagtagcagtctggacctggtccctactggcatggaacccatcactccccaacatgcaaagcccacatttaaaggccagcctctgccccttcagtgatgcgctctttagaaatgccwgyccactatattcagaaatccgcagggcacaaaacttccagcaagtcactgttgtggtgaaatgggcagtgggggtggggggtcttctttaaacaggcccccttcccatctacctagccagtacccatccaatgagtccccagagcctccagaagctgytgtctcctctctggggacagcagctcctgcctttggaggccaaagccccagatctctccagccccagagctgaaaacaccaagtgcctatttgagggtgtctgtctggagacttagagtttgtcatgtgtgtgtgtgtgtttggttaatgtgggtttatgggttttctttcttttttttyttttttttttagtctacattagggggaagtgagcgcctcccatgtgcagacagtgtgtctttatagatttttctaaggctttccccaatgatgtcggtaatttctgatgtttctgaagttcccaggactcacacacccgttcccatctcacttgcccacccagtgtgacaaccctcggtgtggatatacccccgtggactcatggctcttccccacccccactttctataaatgtaggcctagaatacgcttctctgttgcaaaactcagctaagttcctgcttccaccttgatgttgaaatatcttatgtaagagggcaggggatgtcgtgaagatggcaagaagaacacagtttcaaatttctggaaaagagcctgtggtggagatctaaagatgtttagggaagagctcgactaaagaacaatgaaataaatggtccaaggggaagtcatatggctgttggtgtgatgttctttgctgcttcatagacacggcctggagtgaggcaagccacacactgggccctcctggtcctgcagcccttgctgttctgggcacagggtctgggctctcagcataggtatcttgagggttcggaatccccaacacactcagcaactgcatattacatggccaccaccgaaggtcaagaccagtacccgcaataaagtctgactatgttgttctgatggggttccccaggagcagagcctgagatgagcattcaggaacaagtgatttattgagaagtggccagcgcagtggctcatgcctgtaacctcagcactttgggaggccaaggcaggaggatcccttgagcccaagagttccataccagcttaggcaacatagtgagacccccatctctataaaaaatttaaaaaattagctgggcatggtggcacatgcctgtagtcccagctacttggggggaggctgaggcaagaggatcaactgagcctaggacatggagtctgcagggagccacgatcgtcccactgcactacattccaacccacatgatagagcaagaccctgtctcaaaaaaaaaaaaaaaaaaggagcctccggggaaaccaagatggtaactgggggagcaggccaaggaaagggaagaaaccatacaagagtgtgaggtgaagcctcagaccgatccctggagagctctggagcataaatggcacctctgagctgtcctgtctggaggctgagtctttgtccgcctgcaccagtcattggctctggggactctggccctctgaatgggcgagggggcaccaggagctcataggcaaccatctaaagatcacagctgggattaggaacaaagtcacaagcttgtgacaagttctgccgcaaccagaagagggaaccgcaaccacggcagggaatcagccttgtccattgctctgggtgatgttgtgtccttttaatcaacagctactacacacaagtatttgtgatttgacccatggtatgaaaatccatacaacataaccatgatctaacagggtctttgtgaacaaactcctgaggccctaaaatggagtcacctgattggttgctgagtctagaagctgcttccaagttctttgggagacacctggggcccttctcactccttagtcccatcttgagcttctggaccaatgtcttggtgccactattttaaaggggccactgcaaaatgagaatcactggttcactcactcccaggcttaacccaggggcccaggcctctgaaatcccctttttttggttttgttttgttgtttttttgagacggagtcttgctctgtcaccagactggagagtgcagtagcatgatcttggctcactgccacctccggctccctggttcaagtgattctcctgcctcagcctccagagtagctgggattataggcaagcaccaccatgcccagctaatttttgtatttttagtagaaacggggtttcatcatgttggccaggatggtctcgatctcctgaccttgtgatccacccacctcggcctcccaaaatgctgggattataggcgtgagccagcaccctaccaaaatcctcttttatacccaactaatgtggtccaagccactgcaaggccaatctttcatagatttcctgacccatctagttctgcaattccccaagggatgctgggatgttcaacaagttcatcctggtgatgttttcacatcttggccaatcacccacctcagggtcgctgagtgttaccttgagacttttgaacagcactttccaatagaaatataatgcaaactacataatgtgattttgaattccctagtagccacatttaaaaagtaaaatgcaggtgaaattaattttaataatatattttctttagcccaatctatccaaatcattatcatttcaacatgtaatctaaagtgtaaaatttcaatgagatattttacattctcattttttggtagtaagtctttgaaatctaatgtgtattctatacttatatcacacatctattcagactagccacattttaagtgctcaatagctacaagtggctatcatattggaaggtattgttctagaaacttgtctgccaggctgagcgccaattgtggaaataggcacattccttaaacccccagagtccactagtttgactgcaatggttaataaaagtttattattattatattgaaaagagaaatgtaaaatagatacgagccatcactggccttggtatgcagacccttgcccttccagaaagtcttcttgtctgaaccatggctgctgccaagttaccaggacccccctctctctctgcaaggtgattgcctttggccaggtcccctctgcccactgtcaagatgggaacccccaccaggtcctctttttcccctcactcttcctgtggatacagcctggttctacatttaatctaaaatgtgtacttggagtcccaggtgagagcagctcgttatctcagattcctccagcattccagatgggatcagagccacaccttggcatagccaaaaccccacggaagtggttggggggaggtctctcctccgaaacaaaaagcagccaggaatgaatctgcctctccagtgagattcatgtaggatcctcaagcaagtggtatcaggtccaaggggctgatggaaaagttattagcaactaaatataggagtgacatcaaatggcagcatgtaggatcccttctccagctggacatgcagaaaaagaatgctcccaggcagaaagcccagctctgcagccttgtctcaagcctggctgatgtgaaagaccttcaccccatccccctggccagctgggctctttttcagccctgatctttgaaaaagcaaaggtcttctctgggtagtctctaagcaaactgctgggttcaggccacgccagcttggcctcaatccctcaccttccacaagcaaaggtctgctttctgacagccctggttatacccaaagatgactaacagtctctgaccagcatgctaaggccccatgcgcaggctactgtgttactgaagagctgaagagatacgttcaatctttaaaaggaatgttttccggccagctacagtgactcatgcctgtaatcccagcactttgggaggccaaggcgggcagatcacctaaggtcaggagttcgagaccagcctggccaatatggtgaaacccagtctctactaaaatacaaaaattagccaggcgtgatggcgagcacctgtaatcccagctactcagtaggctgaggcaggagaatcgcttgagctctggaggcagaggttgtagtgagccgagattgcaccactgcactccagcctgggggacagagcgagactccatcccaaaaaacaaaaaaaaaagggaatattttgttttcctactgatggcaattcctggcacatagttgatgctcagcaaatgtgttttgaataaaagaaggaaacatctgttcagctaggcaatggaagcagaaaagtcagcccaaacatttcttaaacattgattgcattcctaccaggtggaactatatggaatcccatttggaaggtcaaaatggtcaaatagaggcgatttttgttggttcaacctaatgctttgcattcgtcatctcatctaattctcaaaactaagctgtgaggttgttatccccaccttacagatgaggaaactgaagctcagagacaggargtgacttgctcaagattactcagcaggaaatggcagagctgggattcatacctgggtggtctggctccggagcccacccactgagcgcctgctcttgactacatctcagaaacagctttctagccgggcgccatggctcatgcctataatcccagcactttgggaggccaaggtggacagatcacttgaggtcaggagttcaagaccagcctggccaacatgacaaaaccccgtctctactaaaaatacaaaaattagccaggcgcggtggcacacatctataatcccagctaatagagaggctaaagcaggagaatcacttgaacccaggaggcagaggttgcagtgagccaaggtcatgccactgcactgcagcctgggcaacagaacaagacactgtctcaaaagaaaaaaaaagaaaagaaaaaagaaacagctttctaacccaagtttagcattctttcattcacaaatgttaccttatctttgcaccagtttttagcatgtcaggtgtcctattagaagaatcttatcaacaagatatcccctctacctgcaagcaagatgtctggagattataggattcctacaaacccctctaaggcaataaggcccataatgaaatgacctctacgtagctcagtatgtgctctctctattcctcagctcggagtaagatggcatgtctaaatcgtgaaaagcaaattatattcattcatccatccattcacttttctccattaacatttgccaagtgtctactgtgtgtaaaaccagtgatcccacaatttttcatctaaaccagggcacttctgagatctcagaggagccctgcaaataattccatcagggcaacagaagaatccggaactatgctcggcaaaccagggtgtttgttctccctggaaagccctgtgcatgagacattatctaatccctcaaggagctgacagctgagtcagggagacagacaggagagcagagaggcacactgatggaataggcacctgataaatacttgctgaatggaggaatgaataaggtacaaaaatctgtgtacacacacacacacctttcctgctgggagaatgaccaaggatggcctggtgttcatttgtcctaagatgaatgactgctgagtgaatgtagaaatgaatgattaggcaaagaggggaggaggggttgccaagctgagtagagacacaaagaggtccaggtgtgtaatatgtctgggaaattgtgattatagtgagtagctaaaatatagattgcagtaatgctggaaacactagggttggtgccctggaaaccgtctgaaggtttgaggtcactgcggtcacatgatcaatcctgtattttaggaagctgacagtaacatatttcttcactgatattaaactcatagggaaaacatttttaagaaatttcctgagggataagcaaaccatggtacagccctgcttttaaatattctgcagcatatatgatgagacggatctatgcatactaacatggaaagacctccaagacacagcacttgacgaaaaaatggcagcttgcagaacatgtatgttatcgtttgtattttctaaaaataaaaatggccgggtacagtgtctcacacctctaatcccagcattttgggaggctgaggcaggcagatcacaaggtcggcagatcacaaggtcagcagttcgagaccagcctggccaacatggtgaaaccccgtctctactaaaaatacaaaaattagccgggtgtggtggcacacacctgtaattccagctactcaggaggctgaggcaggggaatcgcttgaaccaggaggcggaggttgcagtgagccgagattgcaccactgcactccagcctggagacagagcaagactccatctaaaaataaaataaaataaaatagaaaaataacagcaagcaaagccatggatttctgtagaaacatacatatgtaaatacatacaaagaaaaaaatctggaagcaatcccatgaaactgacaatagcaatcacccctgggaaaggaagtgtgactgaggggatttaagctttatctatattgcttgaaatttttacatagtgagaatttaattacatatgtacagtattctaaaataattttttagagctgcctgaaatccttgacattgtatgtatgctgaagtcttcccattctgataagcataatctatttcccctaataaggcacagttatcttttacctc

SEQ ID NO: 95249 - DNA, 13011 bp, Homo sapiens
gtaaataaaatcttcatacttagcttcatttgggttatattaatacatgagagggatagaatgggtcaggttgtctaaaattattattactatagctacttttattcctggtgctccgatggaatattactgacataggctcagagatttaagtaccttcaccaacatcatatcatttagccccttccacaatcctttgaagtaggtagggtgggtagcaggtattattattatttaaattatttttcagatgaggacatgaaggctcaggtgttttggtaggggaaaattgccttggggggctagaattttccaagaaaatatcactttatgaatgaaactttccatctttgatttccacactgactcttaaccaatgctacttaaccacagcattgaccaatgacctgttccctctgtcaaatatgttgaggcacatgcaaccttgcatagtcttggttcactctcctactgagctcagtacttctgttaccatcttttgatctctgtgttcctcaagttgtttttataccaaaacacctttatggcaggtgtacttattattgaagtccagtaatttaattacatattacagaaatcaataaaatatgaggtttaaaagagaaaagagctttatgagataattgaataagttgcgtaagtttttcactggtgaaaaaagtaaaccagtaaagaaaactacagtcaaatcagggacaggtgagacaatgacagaaatttgtctctaagttaaaaaatctaaatagaaaactgcatttatattgtttcataggcttttctattttctctttcattttaaataaactaaaatggaaaattttgataatatataaacaatgtgattgacataaactatatgatctagaactccatcttcagaccaacactcataagactgaaccccataataaacaaacacatttgaatatgaacaaatgtacatgttttaaaataaaatactttttttatgattctcacattgaccatttttgattaactgtgtgtttttctgtttttttttttttttttttttttttttttttgagacggagtctcgctctgtcactcaggctggagtgcagtggcacgatcttggctcactgcaagctccgcctcccaggttcaccccattctcctgcctcagcctcccgagtagctgggactacaggcgcccgccaccatgcctggctaattttttgtattttttagtagagacggagtttcaccgtgttagccaggatagtctcgatctcctgacgtcgtgatcctcctgccttggcctcccaaagtgctaggattgcaggcatgagccaccgtgcctggctgattaactgtgttaaacaagagggcttctaactatagttggaagtaaagcaggctaatgcagtttaaacataacactgtggattaaacattaaggtgcaaagttagatttggaatatatgcatgcctggaaggacaggagagtaattttgtttgggcgcagtcagcatctgaatttctagccacccttaattgcttggtcagcatacccatcaaccccctggttacccatgaaatgaaattaggctgcctgtcactgctggacagtggtggccaggttgcctctccaccaacatgatggccctaagtcagaggctaggtggccttggtcatgcttgtggtggctttggtctctttgcttcctgttgaatctatcttgaatggattcgtgtttcataagcaaagtcctgcatgagatcctaatttatcttgtgactccaatttatgctcatgaatccagttgaccagcgacagcattcataatatctaattctgatcctccaaaggaaagctgaataccagaaagggactctcttctgcttgcttgctaggttggactcccacaataataccttctctgaccttgtttggatagaccctctggttgtgggacttggtttgctcgtttcttttcattcattttcaaagcatgaatcctttagtctactccacagtgatctgcaaattgaggatgacttctccctcataatcctagtccacactttcaaaattgtccactagtttgaataaacagattcaacgttttttttaaaacctgatcaaaatgtcttgtctatctcctcttccaaaagagaatggttatagatttctaaccttgaatgtaagcaatcatacataccactttctggatgcaatcacttcttgcactgtagactatcctttcccaccataagtggattccaggcagcagcatagtgtaatggtgaggaggaggaagagaaggaagaggaggagaggaggataaggaagaggaggaggaggataaggatgaagaagaggaggaagaggaggaggaggaggagcagcagcagcttgggagtcagctgtttggctttgggcaagttgccttcctgtgcctcagtgttctcatttgtaatggggtttacaaatatgtttactataaagattaattttcaagcacactgttagtgctccataaacagttgttcttcagaagatccaacagtccaatttctgagctttccatgtatatttgttgaaccttctagattaccttttactctactttttaagctaattataaatgatagagaagatatattttcattttatgcatttagaatttaacatggcacacttaacattttcttattagtatcttaccagaataatttattttctcctcaaacatatagtttaataaagtccactttattttaaagtaaaatttacatatctattgagtagccaatctttctatctgaatgaatgcacatctgattttataatgaaatttaaggcaatgtactccattaatgtatacttactacatacccacaaaattaaaaataaaaatttaaataaagaaactcttttgtaaaggcaaacatgggctgtgctcagttgcttagtcaatatttatatttccaaaaaaactttcttggaatgtatttaattaatcaaagacatatatggtagctgcaatttgacttaatgaggtcttaaggtttttgtggacaataaattggaaacaatttaagtacctatcaataaggaaatgattacattttagcacatccacacaatgaaattctagtaatttaacattttgatgaattattaatgacatggagaatactcataatgttaaaagcagaatatacatcataatacaataccctcttttattgtctttacaccaatgctgtaccttctcatgacatctgatctctctcacctgtgcatttctccagagtacccttatttctaactgcttaatagacttaaaagactttaccagccagaagtctccaacatttatcaaacttaacaggttaaagatgaaactgatatcacatccactcaacctcccaaaccagaagtcctgaagtcaagctctcacttactcccattcgatgagaaactaagcactgtggtttctactgctggaacacttaaatatatcttccaaagctattttatatatatatgctatttatatatatatatatacacacaagctatgtgtgtgtgtgtatatatatacgagctatatatatatataagctatatatatacacacaagccatatatatatatgttatacacacacacacacacacacacacacacaagcttgcacactgtcagccaggctggagtgcagtggcacgatcatagcttaccgcatcctcaaactcctgggctcaagcgatcctctggtctctgcctttcaagtagctggggctacatttgtacaccaccatgcctggcttgtttatttattcctatcatggcaatggctaattaaaaaaaaatttcatttgtagagacaaggtatccttatgttgcccaggctggtctcgaattcctggccacaagtgatcctttcaccttggttttctgaagtgctgggattacaatggaacatcttttaaatgtctcccccttgggcacctactcacttttcagacccataggtatcatatgagctttctggccaaacatgtgtaattaaaatgaatattttctataattttagcagatagaaaagggaagagaatgaaagaaggaaaaagttaatatatggctccttatgtggctttttgagattgaaccgtttgcaaagtactgaataagtcaatgggcaaaatggggcttagagtacttaagtcaagtagtttaactcagatgaaagatgcatgtaaatgtagagaaagagtacagctgtgttaaactgagagcagtgtgttaggccaaattatccagtaattccttcacttcatgaaagataggttcagggtcttattgctctttgggaccaaaagtgggttgcttgccttctaatgtcttaattctttatttggctccttataatgttggggcaatgattaagtgcctgggctttggaattaaacaagcctggattgaaatttggactccatcaactcactaactttgaggctctcattctctctgagctttggttttctcatttataatataggaatagtaaaacctactttgtagagttagaggaaaataaactgaatttatgtgtgttcaaattgtgcttagcacatatgatcaataaatggtagtggctagaaaacatcttccactgtgtatgtaatatggtcaacatgtatacctacttcccttcttttctgaaaggggagagaaatgcagtaagtaacttccagaagtagtatgggggctttgtttcgctggaagtgtgcaaaaactacttgccattttggattgctcttgcagttccagctttataggtttaagccactatgtcttctctagcagtggaatttgaacactgtcatttcaatgtttccttctctgaagaggaattccctttctcttgagatttatctaaatgaaggaactcaaacttaccagcaataaaatctctttaattgcaacttaactgttttttcagctatgtatattttcatttttaatttattttcattttataaacattgaggtcatgagaatattggagttattaaataagagatggcaattattcatttatttatttgctagaaagtagaaagttgcatgaaactataaagcctgggaatttctaaagataactccatctccatatgttttttggaggaaatgatttttgtcttttccaaacaatgacgcttaacacaattgaaagttggcacatttttggtaaacagaattttcctggtagtgtgaagtctactgtgtatttcttttgtgccagacttctcagtatcattttgatctgtaaaacatcagcgtttcctgtattgtattatatttacgtctttggagagtctagacagaaatttttattttaaagagtaatgaataataaaaaataacaaaatttttattgtaatatttgggattatgactggctgtagggaaaaaaagcacaaagcagattacacataaaagacatataacataaatgtttgactttgatatccccagaaggtatatctcagacattaaaaaagacaggaggctaaaaattgtaacacgcaaacaaaaatcatttctccaatttctgaattatgtggtcaaagaaaaaaattaaaacttcaaccacccattggtgtaggaattgttaaaaaaaattctagctttccacagatccatttggctctcctgtaaagactgaaatctgagaatggtaacaacaggttatctctgaggacaattactgcacttgagaaagaaagaacaagatacgctttattcccttgcagatactgaatggagagctctgagcatcataggtaaaccaactctgtgtcactctgaaatacatatttgaggctgctgcatgcagttccccggctagctgcagtcattggtgccagtgctcaggcacctgctgtccttgacctctggccccacaagcactaacccagcgcaggaggaccagccaccgccgccaggctctgatgctggtctctggtagaagaaggttgctcacagctctgctgcaggctcagaagtggccctttcaaccctccagagacatgagactagtccagttccaggcaccccacctggtggggcctcacttgggcccagagatggagaatggtggaagggttatcaacctcaatgcctttgactctatgctccccaaaatgatgacacagttcctagagcagggagaggccatcctctcagtggcaagaagagccytgggtgcccagttgccagtcctaccatggttggaagtgacctccctggctccagccacatggccagataaggtggtgtgtgtgggcatgaattatgtggaccactgcaaagaacagaatgtgcccgtgcccacggaaccgatcaacttcagcaagtttgccaactccattgtggagccctatgatgagatggtcctcccatcagagagccaggaggtagactgggaagtggagcagctgtggtcattggaaagaaaggcaagcacatcaaggccacagatgccatggcccatgtggctggcttcactgcggctcataacgtgagtgctcatgactggcaaatgagacatgatgggaaacagtggctgctgggaaaaaccttcaacaccttctaccctctgggccttgccttggtgaccaaggacagtgtagcagatgcacacatcttaaagacctgctgccaagtgaatggggaagtggtccagagcaacaacaccaaccagatggtggtcaagacagaggagcggatagcgtgggtctcccagtttgtcaccttttacccaggggatgtcatcctgactgggacctccccaggtgttggtgtattcaggaaaccttctgtctttctcaagaagggagatgaagtccagtgtgaaattgaagaactaggtgtcatcatcagcaaggtggtgtgatggctcctgcacaggccctggtcataggatgggggcatctgctcccactcagcttagcccagggaaatgtcgaatgccaggtgtgggcaggtgccagccctgtaagcctcctcttctaggtagaagggagaaggatagagctctcttcaataaatacgtcgggccaaagcaaaaaaaaaaaaaaaaagaaagaaagaaatatatatttgacttatacagcagttctggtacaatgacatccttggtcttggagaaggaggatgagagcaaccgtctgctggggctttggcatattaataattgctcacatcatccctattggatttctttaaaatatgtcacatattacacaccctctaggaaatgtcttctgcctaaccagcaatcttagtttctgtcctgctaaaaccctgattcaagaatgaggtaaagcactaaaggcacattcctgactttttctataagagtgaacacagataaacatacattacaagattcaaagattgaaatgctcaaaagaacaaacaccgtaatgtatcttacacagttattacaatgtattctgtaatccttgtgagatattgtttcacatatcatttgccaagtgttaatccttagtacatatgcaacactaaattgcatgtaataagtaagtaatttttctggggaaaatattatttgttttaaaacatttacatacttatatttacaaatagtttcataaattatggtgctatgttgattttataagattttatttgtaatagaagaagaaatagaaataataagaaatatttaagggcatgaatgcactttgaaataatatttattttatgacaatttactcagaaaattcaaaccaaagtgggcaggggtaaggcattttgctcagatctacgaaatggtgctaaatattgcatgaagttgttcatagtgtcctcttttatttaaatctctgctttaattatagtcatttttaatggttttttttgcatttcctttaattctgctagttttgcctattttattagacttcaaaaaattgacttttgtttacatcaatcctttttaaaaattttttttaaggcagggtctcattttgttggccaggctgaagtgcagagtagcccaatcataactcaccacaacctcaatcttctgggctccagggatccttttgcctcagccttctgagtagctaagacaacaggtgcgcaccaccacccctggctaatttttaaattttttgttgagatataagtctcattacattgtctaggctggtctcaaactcctggcctcaagcaatcttcctgactcagcctcccaaagtgctgggattacagaaatgagccaccatgcctggcctcatcaatccttttatctttgttttatgtttaacatttattcttcattattccttccttttttctctcctgttcattttatagttcttttactaacttaagtctgttgcttagatcacaaattcttttataatatcatattcatgcctataaacttccttctatgagcatttttagcagcatctcacaagatttgatgtgtagtatttgcatcatccctgaattgcaggtaatttacagttatattataaattcattttcatccatgaattgtgtgtgtgttaaaactttttttaagcatcaaagtgtattttttaatcttatctttctgctttttatttctaacttaatgcactgtaatcgaagcatatatgtacagttattcctggaaatttgccaagacttgctatatagtcgtagttggtcacttttcacaaaatctcatgctttgaaaatttatattatgagattattgattggaaggttctatatatctttcttaaactaagcttgctaatttgaataaaggttatgtataaactttttctatatttttattttttgtctgcttaataaatactaatatctgatttttattgggttttctcccagtgtgatggtgatttatcaattccttctttaattctgcccattaatgcttcagatatttggggggaggttatgtatattatgcatttatatatttagaatcttacttgtgaatttcacattttagtgttatagattgacattccttatctctagtaagctctctgataatgattgttttgatttgaaattcattttcatctgacattctttatctctggtaacctctctagtaattattcttttgagaatattcttttgagaattattcttttgagagtcagttttatctaacttgacttttgattagtattagtttggtgtatttttttccatcctttccattttaacatttctgtgtcctcttgtaggcagcatttaactgaatttatttattttatcagtttggtaatctctgatatttaatttgcaagttatttgtttatatttagtatgatttggatttttttctatctcccaattaggtaaaagtttatcctgatttttctatattaccttttgttttcccttttattttggtttattttcgaaattctgtcttttctctcttctaccagattggaaattatacattctaattccatccttttagtggctaatcttaaaatttgaacatgcatatttacctaaaagtctaaccttggcttatatttctcttttcgtgaataacacagaaatattttaactttcctcatcttctcaaattttaaatactatcattatccagtattttagtttcaccttcatattttactttctttgctcactattatttcttgtatttgagtactttttttctggattgaattcttcttcattctgttttatcctcccttgtagttgttttggtaagattttttttggtggtgaattcttaccatttttgttagtttgaaaatgtctttcacacctggccctgtaggatagatttgttgggtataaagttctgggtagtcaagtattttctttcagttctttgtaggtaatattctactgatttttggcttctagttttgctatagaaaagcctttttttttttggttagttactctggtgggagtaattactttctttggtgctttttcagttccagagatgtgtctagctgtgatttacatttacctattcagcctaggatttattgtgctttttagatttttgaactcaagtcttccatcagttttggaaaatccctatctattatttcttcaaatattacttcttttctcatatcctcttctttctccttctaaaacacctgttatggtatattggatatcaaatactatcctctatgtctcttagacactcttttttatttttttgtcattttgatcttctaggtattttccttagctttatatttgaatccattagttattcatttagctgtgtcttgtttgatgctaaacctatctaataagatttttttaaactttaatgtctttataatgtttatttctagtatttgttgttttaaatcttcatagcctttttggatagtaacttgttcctgtgtcaaattttttatgctttttgtgcttaattatttaaaagagtagcctacatttattatttcagttattttaatttatgtgaatctatttaattgttgctgcttctgattttttctcatggtttttattggttgcttgtatgcctcataattttgattgtaggcttatgtttgctgagagttttttaattttattttaattgacacagaattgtacatattcatattaatgtgatacttcagtgcatgtatatatgggttaatgatcaaataaaggcaatcagtatatccatcactgcaaacatttattatttgttgtttgtagtgagaatattcaaaatcctttcttatttctgggctctatgttccatattccattccattggtctatgtatttgttttttttgccaatatcatgttgctttcgatactgtaactttggggtatattttgaagtcaggtagtatgatgcctccagctttttttttttttttgtctcaagaatgatttggctagtcaagatcttttgtcgcttcatacaaattttaggattaaaaatttttttccatgaagaatgttattggtattttgatagggaatgcattgaatctattgattgtttagcgtagtatggacattttaacaatattaattattccactccatgaacacaggatatatttctgtttatttgtgttctctacaatttccttcatcaatgatttatagttttcagtataaaagatatttcacctctttggttagatttatttttaggtatctctatttattggtagcaattgtaaatggaattgttttcttgattttgtttttagctagctcaccattagcatatacaaatgctactgatttttgaatgttaaatctgtatccttgaactttactaaatttgtctattagttctaacaagttttggtgcagtctttagggttttccatatatatgatcatatgatctgcaagcagggatagtttgacgccttcctttccgattttgccttttatttctttctcttgcctgattactctggctaggacccccagtactatgttgaatagaagtggtgaaagtggatatccttatcccagatcttaggagaaaagctttcaacttttccacattcaatatgatgtttgttgtgggcttgtcatatatggactttttagtgttgaggtacatactttctgtatctaatttgttgacagttcttatcatgaagggatgaattttgtcaaattatttttcttcgtctattgaaatgatgatatggattttatccttcattctgttaacgtgatgtatcatatttattagtttgtgtaaactgaaccattcttgcatccctgggatgaattcccttgatcatagcggatgatgtttttaatgtgctattgatttttactaatggtttactaatattttatgagcatttttgcatgtatatcagagtgacctgtagtttcttttttggttgagtccttgtctggtttgggtgctagggtaatgctggccttgtagaatgagtttggatatgttctctcctctttaattttcttgaatagtttgaggagaattggtattctttaaatgtttggtagaattcattggtgaagccatcaggtcctgggttttgtcttcaatgggatacttttttttttgagatggagttgcactctgtcacccaggctggagtacagtggcatgatcttggctcactgcaacctcccagtcccgggttcaagtgattctcctgcctcagcttcccaggtagctgggattataggcacgcaccaccaagcccagctaatttttgtatttttagtagagacagggtttcaccatgttggctgggctggtgtggaactcccaacctcaggtgatctggctgcctcggcctgccaaagtgctggggttacaggcgtgagccacagcacccggccaggataggttctgttactgatttaatttcctcactcattagcgttttcagattttctatttcttcattgttcaatcttggaaggttgcatgtgtccaggaatttattcatttttttttagattatccaatttgttcgtgtagtattgttcaccatagtcttttataattctttgcatttctgtggcatctaaagttttgtcagttttatgttttcaaacatgatcttttctttttattgatgttttgtatttttctgtctgtatttcatttatttctgctttgatctttcttatttacttccttctactaattttgggtttaatttgttcttgtccttttttattttttgagatggagtctctctctctgtctcccaactgcccaagatggagtgcagtggcatgatctcagctcactgcaacctctgtctccttagttcaattgattcttttgcctcagcctcccgagtacctgagattacaggtgtgtaccaccaggcccagttaatttttgtatttttagtagagacagggtttcaccatgttggccaggctggtctcgaactcctgacctcaagtgatct

SEQ ID NO: 95250 - DNA, 128026 bp, Homo sapiens
  misc_feature (1)...(128026): n = A,T,C or G
taggactttgatggctgttttccagcctttggagagctgttgtgtgactacaggggagccttaagacgtcttttgggttatttcagttggaccaatgcggtgaaagttagaaaggacagattcatgttgatgtcttaaaagttttcctgccaaccttggaaaaggctgcctctaaaattgcaagatttctaaaaaagctatattgtcagtgactagaatggatgatctctaagaattcctctgatgccagtttttttcatttttattttccaaattaagtgggaggtaagagaacttttcatatactttcctgaagccttcagacctgcaagaattttgccagcccacaattaatgagtatgcttctccatcttccccactttcactggctaaaacaaccttgatttagtgaacagaatgtcatagtaaatatactccaaccattaaattacaccactgacccacttagggtgaaacagttattaaattctaaactgtgtctccattcattcaccagttggacatgtaaataccagtgctgaccagaacatacaagaaggggaaaatcttgcctcaaagtgaggtaaatggtgagaggaagctgacagaccagagcctaagaggtggagcacatagaagcttccacatactgtctgcagctcaagagggagtaatggtgccctgagctgtgcaaatgccagaggaagggaggcacctctcagctccctggagctaccctaatatttactgtggtggtgtctcccaagcttcacagttcaagccagcatcttcggaacacctgctatgattttagatgagcccagatgtcatcacacagctaagaagataaaccattaccacattctcagctggccatttctgttgttcacttctgaccaaggaatacttagcccagaaggttgccttcaatgcaacaaaatgtacagctctaggggaggaagaccaattaaatacttctgtcaataagttgctgtcaccaaaaactgtgaatttacctctttattttttgccaattacatcattttgacatcatgttaattttcctggggaatcactgtttagtttaaaacaaggaagttttactgctctaatattgacatagattgacaaataaacatagaagcccagtttttattattaccattaactagaagtcttgttacagtgagacaagatatcttgtttttaagttgaagtgcctaaataatctgaaagttattttgaatgatactaacaaccacttggaaaaatctggttaaaacatagagttaaactaaaagataagatcagttgcatgattgcagagttacagagaatttacaagactttaaatagttaccgatagtgatgcttttatacagtgagcaggaatagtaacatattaatgtctggtaactttgtcaagctaaaaaatcataattataggactggacaccgtcgttcaagcctgtgattccatcactttgggagcccaagacaagaggatcacttgagtccaggagaccagcctgggcaacatagtgaggccttgtctctacaagaaaaaaaaaatttaaaaattgtccaggtgtggtggtgcctgtggtcccagctacaccagaggctgaggtgggagaattgcttgatcccaggaagttgaggctgcactgagctgtgatcatgccactgcacaacagcctaagcaattaaggagacgttttctcaaaaactaaaattaaaaaaggatcataattatgaagggggaaaatgtgatataggtattatgtatataaaaacataatgagaagcaccgttatttctcatgaaggcaagtgctttctatgaatccattgacaaggagggtgctgggcagctagtgatgataatggtgataaccaagaggaaaatgtcacagcagagccaattccctttttccaactcatttaaggacccacccactattgtgtttagacaccccgtacaccaaaaggctaaggttgcttctgtacaacatattcaaataaaccattccaaggtagacttcattttacttgtagaaagcaacattttgcagatgagttttgtttggtttgtctccgtcaatcaattttaagccaaatgtataaaccattttaacaagagatgaatcatgaggcacctgagaagtaatacaaatataccagctacaatgaatttatttaaccttcacagcagtagttactgttactatcctgctttaacagaggaagaaactaaagtgcaaggggtttcgaggaatttgtccaagatgcatacagctaagaattggcagaggagggatttgaactcaccttggctgatgccaaatccaagtacttgatcattaggctgtaccacctccccagtaatgttacacaggtaaaaattaatcacgtgcctagtgtgtgctgggaactgtgttaagccctttatatacattaccatgttaactttgatagttgagacatttggacacaggtaagagggataacaaaagaaccactaggtcgactgttctatgtgtctttggcataataccctagcttggatgaaatctctgtgttacttgaaattgcaagattttagcaaaatcagttattttatgatttcttccttgcagaggtggaatggtgcaaaccagtgagcagtatgaatttgtgcaccatgctctgtgcctgtatgagagcagactttcagcagagactgtccagtgagtcattgaagacttgtcagaccatcaatctcttggggtgattaatcaaattacccacccaaggcttctagaaggagcttcctgcaatggaaggaaggagaagctctgaagcccatgtatggcatggattgtggaagactgggcaacatatttaagatttccagctccttgtgtatatgaatgcatttgtaagcatcccccaaattattctgaaggttttttgatgatggaggtatgataggtttatcacacagcctaaggcagattttgttttgtctgtactgactctatctgccacacagaatgtatgtatgtaatattcagtaataaatgtcatcaggtgatgactggatgagctgctgaagacattcgtattatgtgttagatgctttaatgtttgcaaaatctgtcttgtgaatggactgtcagctgttaaactgttcctgttttgaagtgctattacctttctcagttaccagaatcttgctgctaaagttgcaagtgattgataatggatttttaacagagaagtctttgtttttgaaaaacaaaaatcaaaaacagtaactattttatatggaaatgtgtcttgataatattacctattaaatgtgtatttatagtccctcctatcaaacaattacagagcacaatgattgtcattgggtatatatgtatttactctctattattgggcataaaggtggcttctgctccagaactctatccactgtatttccacatcgtgagtcattttactttaaaagggaaaaacaaatttgtagcaactctgaagtatcaagagttttaactacttgtctctcttttgctaagaagggatttttgaatatgctatctacctggaatctctctctcaacaaaaggtatatgccttcaggaatgatataatctgtcccattttcgaggctccttataaggacatttccatgtatgtccttacatttctgaaagctttcaatcttcaagagacaaaaaaaattaaaataactaccctcagcaaacactagctgttctgctcatatatgaatttttaatgcagcaatgttgactttgtttcatactgccaataaactcttaatactaaatactgagtaaagcatattcttttttttttttctatttggaaagacgccatcctctgtttggggaagaccaaagtagataatgtgatgggtttaattttagtgtctgcatctccccagtgaagatgacgatctcaaaatgtaatattgtcatcacttgggagataatgatctagaagtgccatcattatgtggttttcctcaatagactcgcagcatatcattatacaaacagtacatgtttatgtctttatatcacttgtcatagaccctcatcaattacatggcttatgtttattcagcagaatcacatcacctgaagagatgtaatgtttcaggaacattcaattatctgagatttcaattcctttctttcttcttgaggttaagaagcagtcacatgccaaaggaaaggtaggtgaggtcttaacgagatttactctgctcttgaaggctggaatattttctacattaaaaaaaagaggtaatcataatcccttctttctaaggaaacagacaaaaggacactggtgtaaaacttccccaaacaattcaataggaggaagtgctcgtcactgacttttccccccaccatgaaggcacatttccttcctagtctttgcttctcttatctgggagaattttttttttccccaagcgaagcatgaacagttgctaagtggaaaatggaggctgaattttacatggtgattcttacctgcttgatcttcaggaactcaggtgagtgggtctgcctcagtgtcctgaggcatttcttcaagatctagccaaggagtccctggtctttgaagtgtctgaaataaggtagaaggggccaggtctccatggcagtttagccaaagacgatgaaaagcaggaataaaaggagccagctatgcccatactgttgagatttctctccaaaagaaaataaatgctctcctctcatcctccaaatgcttcaggcagcccctgaaatgatacatttagagcagagcgtaaagaaccccgaggaaaagtttgtattattatataacagtctgtggctttccccaagcctttttccgacccggttatagttttattttcttttgtgttgaagaaagaaaattgaaggaatatgattaaagggggtgaggaaatgtagtgtgttttatttggaagttgtcatttgggagggctgaacattttcatgagcgagctgggcaatttaagtaaaacctcattgaaaatggtttctgagccagagtatcttgctctttaatactgatgtttagcaatttgatgtttaattttcttacactggcacatgatgatttttagaaaatctattcgtatttgagagaaaactgtagatattgtcataaaatagagaaatgctcctctccacgactaaaggaaatttagtttgtgataatcaatactttcattggctgcaattagctaggaggttgtgcttggagaagtgggaaaatttgttttattttttgataaatgtatgcaattttaaaaaattgttattcaaactatgaaatttgtatataaatactgcaatgtgaatttaaagactggaaaagggggtgcttttttaaggtaagggaggaagcttatatcgaatatgtcaaatggttaaaaagggagctgagcatttcataacttcagcatatctaactaattgggctaaaatatactatatactttggatggttttgtttctttccaagcttcctttcattttccaataagaggtgtgcttttttcccctaaagcatgtgaaaattaaaaaaaaaaaaaagatggggagttaagtgtaacatattgacattttatatcgtcagctttggaattttaaatcacatgtgttaaatatgagaatgttcacttgaaatgatagaaataacaaaatataagtaaaactagtgattttatttagctcatttgtgggtgggttcttccgttttctaatgggcctcataatttgctacatagtgctttatgagcttttcatcttccagaagggtttcagattgtccatgtccagaaacaacagtgtcttttcaaaaatgagaaagtggtcgtgggctcatgcaacaggaccatccagaaccagcagtggatgtggactgaggatgaaaagctccttcatgttaaatctgcactgtgcttggccatctccaactcttcccgcggcccctcccgctcagccatcttggaccgctgttcccaggcaccccgatggacctgctatgatcaggaaggcttccttgaggtggaaaatgcctctctctttctccagaaacaaggctccagagtagtggtcaagaaggccaggaaatacctccatagctggatgaaaatagatgtcaacaaggagggaaaactggtcaatgaaagcctctgtttacaaaaaggtgagctattcctttcagarcaaatcctgaaagtctttctactaaatatcttgggggttttgtttgtttgtttgtttgtttgttttacatttaagggaagtccacatgccccaacatatttcctatggaagattcataagctaatggaggtggatggtgacgtgcccaatgatggaaaacttcatgaccctcattaaaataagcccaactttttctattgctttttcttccttcccttcttgtcttgcttcttttattaattcaacaactatttcatgagcctctcttctctgccagttaagcactgttagatgtaggaatatggatgtaggcatatacacagcctatatatgtaatgactaaagtcagtaatcggaaaattattagattttattgacagacacttctatttgctaattataataaattattagaacatcagaatggtgcttgataagactggaagatagttgtgtttttgcaaatctcttgtattgctgtttaggggtagatatcttttggaggtaacacacttttgaaatgttaagaatcaatgggcagccacagatttttctaatttattgaccattaatggatataacccagataatggacacatgtagaaaatatgttatacacatgtgcaagctcctggtgcaggacacagttcagtcctgagctaggaatttttgcttgtggaatatataggcagtttaatcttctcttgaagttaatcatgcaattgtgtatttactcttctattagaggtttgctttagaaagtcatgaaagataaaactgatgaatcacaatatattaggcaccaatgaaccttacaaagcatgggaaaagttatcaagaaacgaagcgcctcactaagaagacaaatttttcagggttaagtaaattgtcccagataaattagcagcagatctatgattagagcctaagttttttgactctttgttcagtgtacattttactataccagaggttcccaaatgcttgaccacagacttgccccatggcttgcctaagaatcacctggggtagaaaagggagggcttactaaaaatacacattcccgtagctaatgcatcctgggcttaattcctaggtgatgggttgataggtgcaacaaagcaccacggcacacgtttacctatgtaacaaatctgcacaccctgcacatgtaccccaaaactaaaaataaaaatttaaaaaaaaatacacattcccaggattctttcccaccattttttcctctacaaccacctccaagattctgtttcaggaaatctggatttgtgcataatacttgatatttattaatcaccagaaaattttgatccataatccaatatggagatcagcatccactgtattgttaagtcttttccttaggtgttgatttgtgaggcttatattagtctttccaccatggtaatctttggacaattttttctcactcattcattctgtaagttaaaacaagcatttaactagatgccatttgaatgtgttatgcttttctacaataagtggtatgctttgctacaataaaagttgagagttatagtttctgttcttayatcatttctgcctatgagaaaaaaacctaytcaaaaattcaactttatcagaaaatattcagcatatagcaccaatttgtacaatacctttcctgtggttcatctatcaaggcctctcctaaataatatagaaacaytataactgttccatttttactgttttacacaagaagtgagattcatccccaaaccccaatcaaaccttatttaacataagattacttagttggaactttaaaaaaaagtagatatggactcagtggtgagttattcaagataaaagataattcatagaaaaactacctcctatgaccctcatacaaatatgtctagtaatagacttygaaaataaggtaactagaataagccatttgcaattaaccactgaacaatgctatattcaaaaaatgcctgataatatgtgttggggaaagaaattaatttctagaaaaagcagaagttaaaatttgcacaattgtggtacaaaaacacccttatatttgagtacacataagtataacacatacttttgctttaacacaattataagctaacagatatatttttctgctccatcttaaatatgccattgtggggttttttctttttgtttttgttttttctttggtttttgtttttagaaacaaagtcttgctctgttgcccaggcaggagagccatggtgtgatcatagctcaatgtagcctccaactcctgggctcaagtgatcctcccacctcagcctcccaaagtactgggattacaggcatgaatcaccatgcccagccctgataaaagtttaagaataatacttgtagacctatatcatgagagctcactgacttgctagagtagctactgtgaaaaattaaccgaaatgcattcatatgtttgcaatgagtgatttcaaatcattgtttaagttggtaactaagtattataatctacagcagcacaaatacatgtgttgttcatctatgggatgtgaatttttttgtgtgttcttccatraaagaaagcagacctatgaaggtaaaaatctaagccacatgtttcatatttgtttcataaaagacacattaatgattgtattcaagtttccaggtaatatttatttaacacctactatgtgccagagcttgtgctagcactcaggtaccctgtgctagtactaaggtgccctccacaagtgatttttgacccaagctgcatattagactcacatggcagcttttaactaatactagagtataaaacctgagctttatcctctaagctgactaaatgaggtattgtatttttaaagtacttcctaggtgattctgatgtgcagccaaggttgcaaatcattaaatacatcttattccttaaagtaatggggaaatcagataagtaaataaataggtaattacaatagaatgtagagagaagaaagtactttcctttccaatatatgtccttgccagtatgtcacattaagcactcattccttttttttttttaattatactttaagttctagggtgcatgtgcacaatgtgcaggtttgttacataggtatacgtgtgccatgttggtttgctgcactcatcaactcgtcatttacactaggcatttctcccagtgctatccttcccccagtcccccaccccccgacaggacccagtgtgtgatgtctcctgccctgtgtccaagtgttctcgttgttcaatttccacctatgagtggtacacgcggtgtttggttttctgtccttgtgatagtttgctgagaatgatggtttccagcttcatccatgtccctgcaaatgacatgaactcatcattttttatggctgcaatagtattccatggtgtatatgtgccacattttcttaatctagtctaccattgatggacatttgggttggttccaagtctttgctattgtgaatagtgccacaataaatatacacgtgcatgtgtctttatagtagcttgatttataatcctttgagtatatacccagtaatgcaatcactgggtcaaatggtatttctagttctagatccttgaagaatcaccacactgtcttccacagtggttgaactagtttacactcctaccaacagtgtaagtgttccaatttctccacatcctctccagcatctgttgtttcctgactttttaatgattgccattctaactggcaagagatggtatctcattgtggttttgatttgcatttctctgatgaccagtgatgataagcattttttcatgtgtctgttggctgcataaatgtcttctttttagaagtgtctgttcatatcctttgcccactttttgatggggttgtttgtttttttcttgtaaatttgtttaagttctttgtagattctggatattagccctttgtcatatgggtagattgcaaaaattttctcccattctgtaggttgcctgttcactctgatggtagtttcttctgctgtgcagaagctctttagtttaattagatcccatttgtctattttggcttttgttgccattgcttttggtgttttagtcatgaggtgtttgcccatgcctatgtcctgaatggtattgcctaggttttcttctagggtttttatggttttaggtctaacatttaagtctttaatccatcttgaattgatttttgtataaggtgtaaggaagggatccagtttcagctttctacatatggctagccagttttcccagctccatttattaaatagggaatcctttccccattgcttgtttttgtcaggtttgtcaaagatcagatggttgtagatgtgcggtattatttctgagggctctgttcggttccattggtctatatctctgttttggtaccagtmccatgctgttttggttactgtagscttgtagtatggtttgaagtcaggtagkgtgatgcctccagctttgttctttttgcttaggattgtcttggctatgtgggctcttttttggttccatatgaactttaaagtagttttttccaattctgtgaagaaagtcattggtagcttgatgggaatggcattgaatctataaattaccttgggcagtatggccattttcacgatattgattcttcctatccatgagcatggaatgttcttccatgtgtttgtgtcctcttttatttcgttgagcagtggtttgtagttctccttgaagaggtccttcacatcccttgtaagttggattcctaggtattttattctctttgtagcaattgtgaatgggagttcattcatgacttggctctctgtctgttattggtgtgtagtaatgcttgtgatttttgcacattgattttgtatcctgagactttgctgaaattgcttaacagcttaaggagatccaaaatttcagcccaaagctgagactatgggattttctaaatatacaatcatgtcatctgcaaacagggacaatttgatttcctcttttcctaatcgaataccctttatttctttctcttgcctgattgccctggccagaactcccaacactatgtcgaataggagtggtgagagagggcatccttgtcttatgccggttttcaaagggaatgcttccagtttttgcccattcagtatgatattggctgtgggtttatcataaatagctcttattattttgagatctgttccatcaatacctagtttattgagagtttttagcgtgaagggctgttggattttgtcaaaggctttttctgcatctattgagataatcatgtggtttttgttgttggttctgtttatgtgatggattacatttattgatttgcatatgttgaaccagccttgcatcccagggatgaagctgacttggttgtggtggataagctttttgatatgctgctggattcggtttgccagtattttattgaggatttttgcattgatgttcatcagggatattggtctaaaattctctttttttgttgtgtctctgccaggctttggtatcaggatgaggattccctctttttctgttgattggaaaagtttcagaaggaatggtacaagctcctctttgtacctctggtagaattcggctgtgaatccatctggtcctggactttttttggttggtaggctattaattattgcctcaatttcagaacctgttattggtctattcagagattccacttcttcctggtttagtcttggacacattatgagtccaggaatgtatccatttcttctagattttctgttttatttgcatagaggtgtttataatattctctgatggtagtttgtatttctgtgggatcggtggtgatatccctttatcattttttattgcatctatttgattcttctctgttttcttctttattagtcttgttagcagtcttatgtagtttgttgatgttttcaaaataacagctcctggattcactgatattttgaagggttttttgtgtctctatctctttcagttctgctctgatcttagttatttcttaccttctgctagcttttgaatttgtttgctgttgtttctctagttcttttaattgtgatgttaggttgtcaattttagatctttcatgctttctcttgtgggcatttagtgctataaatttccctctgtacgctgctttaaatgtgtcccagagattctgtacattgtgtctttgttctcattggtttcaaagaacatctttatttctgccttcattttgttatttacccagtagtcattcaggagcagcttgtttagttaccatgtagttgtgcggttttgagtgaattttttaatgctgagttttaatttgattgcactgtggtctgagaggcagtttgttgtgatttctsttcttttacatttgctgaggagtacgcagtcattctttaaaaaaatgtttcaagggtaattttaaagttgcatatttttaaacagtcttttgggggcacacaagagtttatcatattaatagtttagctagcaccattattactaaccacttcttcttcctgaataaattaataaatgtttcaactttgtgcaaagtgtttactgtcagaacagtaaaggaaaaaggaataataaagctttaaggactactttcaggaatgccatgaatagttagtgtatggcatcataaattattgcttttgtcttctgtgcaatccaagtataatttttaaactcaccaagcaatcaaatgttacagttgaccaggcacagtggctcatgcctrtaaccccagcactctgggaggccaaggtgggagaattgcttgatgccaggagttcaagaccagcctgggcaacacagcaagaccctatctgtaaaagaaaaaaaagttacagttgcatctattccagcaagaaatagcactggccccaagcagacaacaaagcttacagtgacccagttattgaagttttatgaatctatcagatggggaaaatttctcatgccttggcctgtacagaaacagggaaatttactcaaaggaaattactggtttgctactagatctaagcaaatattccttgccagggggaaattaaaacattataaactcaaaactggtttcaaaaacattcacgcaaatccatgggccgataggccatgcctatgtcattccagaactttcaggtgaagggtgcagaactccatccatggtttggataacttttcgaaggaatgtcaagtctccttacatttataaaaagctagtcaattgtctaaaattgttatttttcactcagacatttcattctgtgaagaaagtaacactgaatatagaatgtcagccaaccaatcagcatttattcatttatttaccactcaattcagattcattcattcaaatctcacctttatctgagggcaggaattttcttttttaattccaagggctgcactggaaagcaggcaaatatttgtaggcaaattttcaagtgtccctgatatggccgaaccggtaaaatccctaaaagagattttgctgatgaactaaaccatattgttggcaggctcgatttaactgctggttaaagtaattgtttagttgtagtgatttgggagagggaataaaatgtgtgaacattgtaaaagataagcaatcatatacacccttgggaaaaaagttttcgtagaagttgttggctttactggccggcagaagtacttgtgaatacgaagagcttgtggggaaaaacaaaacaaaacagaaagtgccttttgtgtatacaaaccctacttgtactaaattggctgtcacggtcattttagggtttttcttcttgcatcattgtaacaacatgggccttgtagtggaccatttttaaatataatgtctgaaaataatgttatcaatgattattgatatatgatttatatgatcattgaagatagcaggtatagcatccagcattccccaaccatattcagcctgtgacatgtcactgaacttatcagggcacacacagggctatgtatgactttcatgggccctgggttcttttgcctctatggtccctttcctctgctgaaaaaaagaaaagtaaaataatagattttcatgtagcctaaaattgtcatttttcctaatctatgaaaaagttaaaacattttctttgactctaaagtttcttttttattttcaaacaaattaaatcattgtgttgccctaaaattatcatgggccctaatcactgtgcctattgcgtctaatggacaagtcagtcctgcgcacgccaagttattcaccccctttccagctcccctttccctgactctgtttagtctctggttcaacacctctctcctatagcctgatagccctgaactttggagccattcttcctcctccacccagcatgccttccttccaccctactatttcagtcttttctcctaaagaaaacatagggtgttaggtaaaacaggcacatcttcataatgccatgcatagtagaatcgttgagtaatagttggctattgaaatgtatttctttgatttagttagcctttcaattatttttttagtctaatttattccctgtgctatgctttagtgttttactatgctaygtcttgtatcaatttccatttattaattttactttctttctaatcatgggtcttttaaaagtaatttagatatgtattttaggtgcactctttatttcactaattatattttctgaaatgttaattattcttttaaccatttccaataattatttagtccattatcattcccatctattccagtcaagtcttatttaatgcacrcacacacacgtgtgtatgtgtgtgtgtacagtcatccttcagtaacatggggatgggttccagcacctcctgcagacatcaaaatccaaggatgctcaaattccttatataaaaagatgtagtgtttacatataacctacacacatcctcctatatactttaaattatctctagattactaataacacctaacaaatgtaaatataaatagttgttgtattgcttagcgaataatgacaaggaaaaaatgtctgtacatgttcagtacagatgcaaccatccatttttttcctaatatgtttgatctgcaattggttgaatccaccgatgaggaacccgcagatacaaagagccaactagatagattaggtaggtaggtaggtaggyagycaggcaggcaggcaggcaggcaggcaggcaggaatatagatagatagatagatagatagatagatagatagatagatagatagatagatagatagatagatagatggatggatagacatcatccttttctaaagtatctcctgtttcatttgttatcttttttccagatgatttgctctctgttaaaaaggcacattatatttggcatcttcctacagaatagaaagtaccagtatagttaaaatcttctattccaaaaatgagtttcattcaagttattttgttttcaacatgcttaaaagttatttgtatcatttaaagaagggaaacttacacaatatattatctttataaaaatttttatttctgttattatttctgagccatagatgaatttataagataaaatacacattgctcttttaaaaatgaatttgaaagatagtcttgatattatgcagtcattacaaatcactttgtaaggtgatagtaccctataaaaagagctttatgcaacttaaatgctaaaactttttagattgaccaagaatggtcgaccttaccttgaattgtgttctgggagaaattgtgttatagtagggaaacaatgtagtaacaatgacacaataaagctttcaaaaatagctttcacatattgttccattgtataagaagttttccttgcatttgtcaaaacatcttgctattccatgaactgtgaaacatatataccttttttaagaacacccaaagaattcatggataacaaaatatccaaagatctactatttcaaataaaatttcacagcacctgtttcaacaaagagttcaggagataaaaaaaaaaaaacttaatcatcttatatatttctataatggattttctttcttcccatccattttataatccttcagtaaccacataagaaatgattcaaatttctttttggttcatattatgtatatgactaaaaccatatacgtacatgtatattaggaatcacctgagaaacttgttataatagcaggtttcaggtcccacaccaagtctgctaaatcgcagtttccaggagcaggaccaaggcttcaatattctaacaagctccaaatatgattctgatggctacaaaagttygcaaaccactgctttaaatttgacaaaacttggaagttgaatgttaagactaaatcttctttcttgcttcttaaatagcacaagttaaaaacacagacacaaaatgaaagggtactggacctgaatattctgtagtttctttctttggaaaaaaggtggtggtctaaaatggaaaatgaacttgcttggtatgggatgctttaaaaatatatttagaaggttaattaaagataatgacataagactgaaattttttccataggatagtccaaagctacatgcaatggtaataacctatgttatttgcagagaaatttcaagagtgttttgaaaatttatctacttttgggaaagtccagttttatccactggattatgtaagctgactaatttttttaaaaagttcttaggatagaaacttaccaacagctctttagtgaagaagagtaagcataggttgacatactaagacatgtaattagatgctaggtatttagaagcttgtttttgtcctaaccccacggttaaattttttttgagggtctaagagctaaaattgtcatacgtagcagtcaactcagaggatcaggatctaccacagctcaaaacaaccaaaatgctaatctgcatatacagaaatgtttacatccctacaatagacaaacgtctacttaagggaacgttcaagcacctaacttaagcaagactgcagaattaagattgtttcctggagtttgttgtaaaggaatctcgctaatagtataattgagtttgtcatgtagaaaacaccccaaggacgaataaatctgatctatgtccggagtggctaacctgggcacaaaggcagtaatagyggcacaggattcagaaaggcaaaaacaaacagaaactaagaggaatgtccaaaaatcaatcaaagccgagatctagtagatgtacaagtaggatcgccagataatatacgcagcactcggttacatttgaatatcagataaataacaaataatctttagtataagtatattactaatacatagtatgttatcatccttgtattattgtatatgtgggatacactaaatatactgaattatactaaaaattggttggctattcatctaaaattatttgactggatagaatgtatttttatktgctaaatccatcgaccttatgttcagggtactttgcacaaccctttgtatctcaaggaaagactgctttatagccaagattattttattaactttcagaagaactgctgatatttatatcttgataaattataaaaataccttttccagcttaatcttctttttgtgccctcatcgccctcctctttacatccattatcatacgaaatgcactaatcagttgaaattggaatggaaaggagtgagactcaaaagagggctaagtaaggcagaacagatcagggaaaataggatgataaatagcttatttaggagacctcacctggcacatagtagttgtataataaacagttgtttgaataaataaccrgtaaatgagtagttaaaaataaaatcctcgctctcccagtcttttagccagaaactcttcaaaggcacagttatcygattgtataaggttttgtggggttttctatcccataaaactcyagtgcactatggagttgatgggaagatctaaacataccacctcaaaccataatttacagaacttatcagtgcttcacttgtgctctagggtcttgcttacacagtgcagcccaaaaaccagcaacatcagcatcacctgagagcttgttaaaaaggctggctctgaccatctctagtgcgtcagaatttgcacattagcaagattcccaggagatggagagcacattttaaaattatggctaagtgaacctaattcatgaaccagtatgtwttttttaatatgggcaattcagccttgcaaaacaaagctataagttaatcccaccagctcataaattataagtcaattctctgttcttccagaagatagatagcttagaaaatacaacagtctcatcatttgtaactcatacagttggattagaaacagtttgcactgtggctaacgaagtgtcattactttccaaggaactgtcaatctttgtggtgaagttaggcaagtcattaacagtgattctcaacctggtattttgtttaaaacctgctttgagaagctgataaaagctatgacggtaccccacagaagaaaagtacatattcacatatacatataattttgcacagtttttggagactcatggattcccctgaagccaattcagtgaccccccccctaaattctcatagaataggtttaattctcttttctacacagcgctgggtttttctttggtagcacagtttctacaactttccttccagrttataaaattgatagatagataaaggatgggtgaattggacaggacaaatgaacattgtcacacactcaaagtatatttgctttttcatataactgaagcttatccacatgcccattattgaaaaggccctcttttgctaagtaaaattgattttatgtgaagaattcataaaacatgagaataatctttgcaactatcttttctttacctcagctggcctgggagcagaagtttcggtgaggagcactagaaacacggctccaccccagattctcactacctttaatgcagttccagatggcctggtattccttattaggaataccacagaggccttcatcagaaatgctgcagaaaactacagccaaaacagcagcgagaggcagcatcccaatctgcacatgactggaattacagacacatcatgggttttgtcgactactcagcccttctccagcaccactgaagaggtaaaaggagggggtgtgtggagtgtggtctgtgcacgtctcaggaggctcattgcttgaaaagacttgctttgctaaaaatgccactgctgcagtagggggattaggcactctcaccctgtgtcctggctgctaattgtacaggaaagcattttacataatgaaaatctttgcaattgactcaaaatttctatatctttatgagatgccgataattaggctgccatggartaactgtatgttggccatattttctgaaccaaagtcagggttcatggtgttacacatgtcctgaaaccagaaaatagaaattgaaatcagtgccctgcaggcaaccctgagtatatgtcataatcatttatgctccaaaggaagggagagagactaaagcaatggcagattcaagaatcactataattgattcaggagcacattaaaagataaacaaaagtcacgtaccacttccacatcaatacccttgaaccacctccaccaggtgacattagtcaaatgactgagaagcagggtggcaccatcataggagtctgttcaaatagtgattctgcttcaggtgttcatctctttggttttgctttccttgcagagttttagtccaccatttaggcaatacatgtaattatagcacatcaaaaaagctaaggttccactggcagacttcagctttttcctaataaacaacccaaatcatttatagaagtcatatgacttcacatccatttagcattctggtatcttttgcattgtgcagaatttcacattgcatatggttcctggctggtgagcacatgtttcattattgatcataaaacaaatatagccagtgcattgaataactcatgggactttatttttgtctctacttcgccttyactataaatctttcctgtgacctagttcttccttcacttctgaatagaagttagaaaagccccattacttttctggacacyctatatcactttaaaactcaatacttactctcagttcattaacaaaaataccaactccaggaaataaygtgaactctaaatttgacttaaatgttagcttctcctctcccatcaccccacccagtttgggcttaaagcagggaaagggaaacatgtccaaattctctcactctccaccaagcttttcacccacctctcctagcctgataattatggtttcagatctatctgggcgtggaaaatgggaaaggaagacaggaaatggaagcaagagagttatgacttaaggataccatcatcagctggcactgtgctctccctaaatctccagctctcaaaccctttcaaccactgacatgagtgagagattcaccgcttactttttttaaactaaacttytttaaaaattttgtttaaatttagttaaagttacaattacagtagtaatcttcttacatgcatagatcgcatagtggcaaagtcagggttttgggggtttctatcacccaaataacatacattgtacccactaagtaatttctctttatccaccctcttccaaccccctcatcctgagttttcattgtctaccaatccacattctatgtccatgtgtacacattatttagctctcacttagaacaaaattcagtgtttatgtctgacttagttcwcttaagataatggcctccagttccatccatgttgatgtgaaagacatgatttcattctttttcatggctgaatagtatcaccacttacttttgaaaatgaatgtttcttggaggagcacctcctcattgtggctgaatgtgcctagccaaaacttccattctaacatcagtttacaagagattttatttatatcatagcttaaatatatgtaacagtagagaaaaaaaattaagtgtgtcaaataagaaaaatattgaataaaaactattataaacatttatctgccttgaacactaaagggttgtcttttagcaaaaagaacagtctccaatttttgcctagctttaaccattgtgaaacacagagagaagtccaaggggtagctaggctctgctgcagtcaagagtctgggacaaccagttccagagctctgcaaacacaatacccagtgggccaacccagcactgtgttacagagctcacatgatccagccccagacctggcttgcagctttggatcatgtagcctttttctagagtgagattcactgcagtgtttatatgagctcccaggtagggcatcagaatgactatgcatccaactgtcatgttccagtttttttcttgaagcttaagcaaagttttaactatgtcctggtaagctartgtgtaaaagctatgctctttcaaaagacagtttctacaattgcagctctcatgactctaacgccttagactgagcatccctgagaggttattatttgatttagcaagagctttaactttataccagtccattataaacagctgtggttagatactttgaaaagtaaaaatgagtcacttgggatataaattgcctgtcccttgaaagtaatttcaaaaggtactctgtctcgacagaggatgcctagaaaagtataagaaaggagtaaaatcatttgacttaattgcttggaattgtgtaaaaataaaatctctatgtgtccattgttttccttatcagacagcatctggtttgtgatgaccgatgggttagggttagggttcacttgcatgactagcagtcagtgctgggtgtaggctggggagtctaggttctcctccacatggcctcttatctgccagtaggctacaccagcttccttttcatgatgggttagggcagcctcaccagaagtcaaaggtggaagctacaagccttttgaggccgaggctctggaaccatgcaacatcacttctgcgatattctattgatcaaagcaactctcaaaccaggctagattcagggagtgtagaaatagattccatttcttgatgggaagagctgcaaagtcacattgtaaaggagcgtgcatattgagtgggaggaatctgtgaccattaagcaatctaccatagtatcatcattatcattatcattatcattatcgtcatcattatcatcatcatcatcatcaccaccaccacccactatctctgttttatagatacccagctgaaacttaaaaaggaacttgcccaagattaaatgactagggaataacagaccaagaagagtatacacacacacacacacacacacacacacacacacacacactcccctaaacatctagtcacatattctcttacatagtgtgcctgataataaaggtaaatgccaaggaggacatgatttgaaatccagcaatcactcctctctaatgctactgcaagattgtcctatgttggctattggggatcagagtattccctgccgttctccttttctctctctcttctcacatccttacctgccagtgtgaggggtctgactttggaagtttgtatacttgggccggtacttgacctcaaaactctgtggtgctctctctcttctagcccccaaccctgagcagtaaatgaattaacacatatcataggcctagagtagtgcctgaatgatagtaaaatagtgtttaattaattttagctgccattgttgttattgtcacttttataaatagtattatgtggattrcgtgtcttcacaaggacaaaatcgatagaacaggaaacttgtctatggtatgagtcaggaaatactttgatcaattgttcgccaagtatggaccctagtcccagaacttattagacatgcaaccacttggaccctattctagacctaataaatcagaagctgggactctgtgtcagagaaacctggcttaaatcccagtggtgatatctactagttactcaagtcccactcatttcttctttaacttaaggatagttatgggtactcactctgcctcataagacaggattaaattctgattaagtaaaatgttttcgaatactggctaggcctgatgcagtggtttacacctataatcccagcactttgggaggccgaggtgagcagatcactcaagcccaggagttcgagaccagcctgggcaacagggcaaaaccctgtctctgcaagaaaaaataaaaaaattaaaaattacccagatatggtggtgcgtgcctgtgatcccagctactggggaggctaaggcagaaggatcatttgagcccaggaggccagggctgcagtgagctgtgatcatgcccctgcactccagcctggatgacagaatgagaccctgtttcaaaacaaacaaacaaacaaaaaacaaacaagaacactggctatacatgataaatattcaatagttttagctattaatactagcttctccttgttcctgcttcatcattcctaccttgccttcttcacagggtgttaaaaaccagatgagtcaacatattatgtgaaaatactttgaaagggataaaatgcagaacatgcattagaaatgttactggctggttctgatactgctaaatatctctaaatctttccctgcccacccacccttgctccggcctgggagaaggattgcatttcctcagttcatgaatagccattgtggtactggtctgggctttcacagttttgtgtttccttctatttggccttcaaagagatcacagcccagtgtgagtctccagataaatgaggaggcaaatgcagaaaacaccccacccctgcaaatgcagaaaactccaccccctgcaagtctgggataacctcctatattggggtcacttaaagtatgcaggggagacaccccgctgctactactgttctgtagccagaactaaagatgggaaaaaattccccttcactgaggcaaatgcctggagggaggagggcaaagaagtagcgggggagagggggaaaggaaaccatcctctgatccttcatctcgactcctagattgactagtgtgaatggatactatataaacagactctgagactgctgatgctacaaaaaaggccacttgggaaataacatattgtggggaggatacgtttcaaaagaacttaatttataattaacatctttcaagcctaattctaacatggactatagttttcttaatttgccagttaaagtggactaccatgtgccaatagcataaagatggtctacaattcactggaccccaccagcctgaaaatctcaaggatttttattctctttcattttcttttagtgatgggcgatttgcattgttttccattttgtgcacaaaaagaccatgttgctattttgtgaacatatagttaacccttgaacaacatggttttgaactgtgcaggtccatttatacgggactttctttcaaccaaatgcaaatgaaaaatacattattggtggaatttgtaactcaggtatacagaggaccaacttttgtatatgcaggttttgcaaggccaactattttacttgagtatgtggagatttggttatacataagggtcctggagtcaatccacccccatactgagggatgactgtataatcatatgcacataaaatacaaccatgaacagaacacatgcattgaaatgggccytttaacatgacagtatttctctgccacattggtctccctgggcagacgagttctaccctagatgaaagttgatacagtggggagagagaatggcaatgggaaagcaaaatgagatcaaaagagaagccaggacatgctgattgagaggggaagcttgtggtgcttaccattggttatacatatatcggaatcacctgggaagcttttgaaagatacatattctaagattccacctcagacctatatcaggatttactgaggtaggacctcagcacctattgtgtgaaaatctgccagagtgrttctaatgtgcaatcaggtttgcaatccattggagaataactgaataatcagcctgttaagaaaaactctaaagcaggaaaaaggaggaagtgttgttggggatatacaacctaaatctaatcacaaggacatcagataaattcagatggaggaagatgctatggaaataaccaacctgtatcattcgaaaaggccaatgtcagaatggtcattttaaaagactgaggaattgttccacattaaagaatattaagaggctgggtgcagtggctcacacctgtaatcctagcactttgggaggccgaggcaggagggtcacatgagcccaggagtttgagactagcctgggcaacrtggggagatcccatctctataaaataaataatttaaaaaatttaaaaagaagattaagacactgacaattagatgcaatacaggatccttggggctggatctagagagaaaacaarcaaaaaaaaggatattattgagatcgttgacaaaattgaaatatagactgtggatttaagtatatccattttgaatttcctgaatttgataactttattgagattgcacacttaattcaggatatatgcagcctattccctccacccataatttctgtgggtgactgtttttgwtttccttttctttaaagccaatgttatcataagccatgctttatttgtctgctatcctagggtttggtaataaatgtttgctagctcctaaatccatagcgtacagcagctacacccatatagactgccccattgcaagcattactgcctcaactgggttcatstgggagtagactcccttccaagggtggggtggcaggaactgtggtgtgaaagaagatgcagcagaagtgcctgattggaagagtggctcacttgcactcacatctgattataaattatttggctgtttgtagttacagagctataacaaaagctatgtaaagcccatttccttcaaattaaaacaaaataaaaagtaggggaggggaagaggctgataaatgggtgtgggaaaaaagaataccaggaaaccttagagatgtgttctagagagacagtggagcctgctgttagagacgtaaccggcactcccacccctcccttgcagtattttaaaaaaatcttggctggtctaacagactgagcagctgttaaatgtctttgggtgttgatctactgaagagtttcttgggtatgattttaggtacgagattggaagcaatgataatttacggtcatttggatgttctcagaaagatgagttctcagtcatgaactttgtcattctctaattttaccgactgcgcagcattcattgtttattttaatgttattcatagaatagtattattactaataatcatggaacttaatatttattgagccctttagacaggaactgtactatacatatgacatgcaacttctcatttaatccttacaaccgccctctcctaatgcttctattatttccattttcctggagacctatgatctaggaagtttagctagaaaaattccttgaaaagtaagtatctcagactgtctctctaaacacaaaataggctggtcatggtttttggctttaaactacttatcaaagtaacatttctctacattttaatgcatcacacctgctgcaggttaaaattgtattcacttttgccagaatttactattgagccggttcgaagtaaaactcagamaaggatttgccatcttgtagttgtttttaattgacacatttccctgattgctatgctttcttctaataaatacctgaggtttgcataacaaaactacctcctaggaggaaaggtatcaaactggccttatgtctaacatgtgttaagtttgctacatgttgatcctttttgcttaagtattcacagttaattttttttgtttgtttgtttttgtttttgagatggagtctcactctgtcacccaggctggaatgcagtggtgcgatctcacttaatttttaatgagaagttatatatatcaaaatatgcatattatatattataaaggtcaccaattcacttaagtaatacattctaaaattgttcttctaagtcatctatgtagttttcttataagcaaagagctcagtaaaatttattaaaaaaaaaattaaagccaagatctcattaactctcctgaatgtaaaatgatatcaagtacagggtttagggtataatctgagactttgttcagaatttgaataactccttctcatgaactagtactggaaggcctattaaaatacagagggctccattattgagctctatccccagcatttctgattcctaggtctgtggtgaggctggtaagtttacatttctagcaagttctcagatgacgataatttgagagctacactttgagaaccactgttctaacgggtactgcctccctcctccttctccttttcctcctttcatcttccctctcttcacttttcccacctttttctctttgtcttcaaaatgaatcttttcttctttgtcattcctttgctcttccctcttttttctcttctctttcccctcttcccttccaggatagtatttaagattctaaacattcattctaaacatggtccagcaggaccaacaggaccatgtttagaaggacttgtttaggatatttattcatgtaacaatatttactaagctgacatgaagattcagcaaatgttggttgagactctatgaaaatccctgtgcaagaagagcaggacagacaaagattctgctctaacagaatcctccatatgaccgggaaaggtagacagcacacaaatacataaatgattagattattaccaaaagtcattgctctgaattaaatggccactgagatgaagaataataaagacataatttttccttgtgaggtcagaaagggactggccccttagaggtgtgctgaagctgaaacctaaaggacgagagaaagattgccaaacagagagcctggggaggagtggctgaagaagaggaaatgacaggcacaagagctctagggcaagtcagttccataggcacgggatggggagcagagcctccaaaacctataccagagcctggcacacaataggtggctagtcagtgttcgctgaatgaaagtaaatgaattatcagacccaagcaagtggagaataggaggcaagcaggagggaggaaagaaatgggcagaggccaggtaatgaggggccggggtaaggaccatgaccttttaggtcatgggtgatgggagtgtggattaacctaaccagtctactctgccctcccctcatccatccaacaccactgcccctcatccccatgtccagttcaaacccctgtccaaagtaacggttctcaaacagtggctcccagaccccttgatgacccattgtattattcaacatctatgttcataatgtgacaagattcatacttttagccatgaactcataattaataactttttttgagagaaggttttcactctgttgccgaggctggagtgcagtggcacaatctgggcttatggcaacctctgcgtcctggggttaagcaatcctcctgctgcagcctcctgagtagctgggattacaggcacgcaccacagcatccagctaatttttgtattttttgtagagacagggtttctccatgttatccaggctggtctcaaactcctggactcaagtgatctacctgcctcagcctcccaaagtgctatgattacaggtgtgagccaccgcacctggccaattaatgtttttaaattgctatgactttttttttttaagacagctgcttgttcactcatgtttaatcaaaagcagccccacccttcccatgtagtctgggaaaggtttcctggtggcaaggaagaaagcttgtcccctgaaatggtacagagtggctgattccaaatttctggaatgcaacttctaattcaaatagtgtccttatgtaggacaagcaggctcaagagaagttgaggaattccaaacaaagatgagaacaaaaaccaaaatgaaccaatttatttatactttgtccagtagtttcaaataaactcctcatagaaaagatgatatctggaagcttttttcagtcctatacttccttgaatatattacagttttcttggatttctcatgttaagttttgtacttttaaaaggaaaaatgttatcggtaaaagcctgagtttaaactcttcctcttgtttcatagtatgctcatgtttatgggtcatttaggactcactaatcatttgggagctctgctgtcagccttaaggttctgctagcacattaaagtttgcaaaggtagtttaatgtagttgtgatattatttattcataatagctgtgtggtgtatttagagtaggtattattccaatgttacagttgaggaaastacattgttatctaaatacagcaagagaagaaaaacataatgttgcaaaggaataaaactgggaaaagkctcctataaaggctgagggcagccagagcctgtaagaaggcttgcagtatctgtggagagcaggaggggacccctgccactgatgaggctgacaggtatgccaggctgtgaagagccactgaacttgggcacaaaatacagagtaaaagttctttactctkcaggtgacctaggcagagaaatagggagtttttttgttcccagaaatacacagatgttctaggtttgaccttctttgagwgtttgttaacttgaaaggatttgaaatctctggtctggctgtagattaaaagtctgtagaatctctcgaggggaagaaacttcgttttttcattaagaggtatttttaaaagcatgttttctaaaagaattgaagcaggccaggcacrgtggcacacgcctgtaatcccagcactttgggaggccaaggcgggtcgatcacttgaggtcaggagttcaaggccagcctggtcaacgtggtgaaaccctgtctctattaaaaatacacacacacaaaaaaaattagctgggtgtagtggcacacgcctgtaatcccagctacacggaaggctgaggcttaagaattgcttgaacccgggaggcrgaggttgcagtgagctgaaatcgcaccactgtactccaacctgggtgacagagtgagactctgactcaaaaataaataaataaataaatagaattgaaacaattttcacttttttcttttttcttgttttaactttcctcaaagtagacacagtagatatagtagacaataacatagctttatgtatagcctatttgaaaaagaaaggaatatgccatccttcccgctgatttgaaaattagaatgtggaatttcatttcttttggcagttgttagggatggtgctccaaaaaagcaataaaaaattataaaacttgttgcaatattttgcttttctcacttgtgtacaattaaatatttttgctctttagttattgggagcttttctaaaatcagttttcagataaataaccgtttgggtactgaagcagttgctaaagggcatacagttagggctgaacgctgaataaatgccattttttttttaacttgtggagagctgactatcaacagtagtttccacaaatgagagtttacatggctgtcttcttttggctggacaattagggatgaaatggctttaactactggatgataaaactgttagctgtgggttgaacacttggtagtgattatatttgtcgttagcgctatttacataagatttagggaggatacaaacctatacaagagaaaagggaaagtgattgggagaaaagaatggtcaagctgacaatccttttggggtctttttctcttgctagtgtcaggggatgccaccgggacaaatgaatgctttgaagtgagaagggcaaaagctctctaataaaagacttcaggaaagagtgcaggcgacctggggaaatatgctgcggtcaagtttaatcctgggaaaaagtggtcctggagaaagcagatgaggaagataggaaggaagatagggagggggagacgctgggtgtggagggaggaaaggggcgggggtgggggcctggaaagtgacagggagcaagcactaattgtggctaaggcgactgggtcgagaaccacagactggggaaaagggagagtacgggaggaggaggaggcagagccccgcggagccggaccggacccctggccgggaaggtatcggcgcggggcagcgggggcagcttggcccacatcgggccccttggcaggctcaggcgttggctcctcggggctccctccctcgccggcgcattgttcctttgccgggagacgaggaaattgccttttgattgcggaagtcagcggacsgggctggggcgaggcagcgcgggtcagaatggcagcgtgggaagggcggcgcgctgcctgtccccgccgcctctcgcgtccgcagcccgcccggggcggcaggagcagcagcagcagcggtggccgcagtggcccctgcgcgtcgccagccccgagggaagcgcgctgcgcccacggggcgcgctgagcgcgcgcaacaggtgaccccctgccccggccctcgggccgtcccacgtccagccccctcggtctcctctggatcttaactactgagcgcaatgctgagccatggagccgggttggccttgtggatcacactgagcctgctgcaggtgagtggcccgagaaggggtcagarctgatgcgccccctccccgccgaaaaccaaattcccactccactttctcgtctatcgggttgtgctttgaagagggaggtggcaaaatttcttcttctgccttgggaagaatgatcctctggtgagccccccaacccagaatgacagcttatccrgctgtcaaagcaaaaagccaccttctctctccagctgctctcaagggacagcagctagggagaaagttgccatccacctcccctgcaagcctcttctctggccagagggcaaaaggactggctgaggcaagggacaaaggataagtagaggagaaagtgtggcttgaggagcttgctgtggacatgtccctgagcagtccagactgtggacttaaactgttgtgtctgattcctttgcagactggactggcggagccagagagatgtaacttcaccctggcggagtccaaggcctccagccattctgtgtctatccagtggagaattttgggctcaccctgtaactttagcctcatctatagcagtgacaccctgggggccgcgttgtgccctacctttcggatagacaacaccacatacggatgtaaccttcaagatttacaagcaggaaccatctataacttcargattatttctctggatgaagagagaacwgtggtcttgcaaacaggtaaaggatgacaggtgcaattggatggccaagcmacacggggttgggccctgccytttcaagctggtgtttcatttgagttccagggatacaaaaaatgaaggtaaaaatacctgtgaagataaatattgacagaaatgtctggtttcctcrgatctagccagaagcagcttggtggactttcagagactcccttagtgctgaaaacagccaactagctactgaaagggtcggggtggggtgcagggcggtcagcaaagagaaactttgggctgcggtgggaattttttaaagtgatgtggtttamgcttccattgcattaaattgtcaaaccctggaataattttaagtaaacgtttttagaataaataatagaagtacaatattaggggtatgcctttcctcaacttagttttatttttagaactgtacataaaatctgcaggaatagaatggagccattcatcagggaaaattagaaaagtctcttgaaatgaggacatgaaaattgttttgtatctcttgagtaataacccaaacagcatagtatcagagaacgtcctttgattactttacagcaattattttccttacacttttgctgaatccctccatgtggatatgttcagagtttgcctttcttgcctcagttttcttatctgtaaaatgggagtgttagacttaggtcattcaagtccaagttcttaccaagtgctcaacacttaggtatgggctgtcatgtacattacctcatttaatcctcagagctaccctcagacatgctctaaattctttaacaattttcakgttttctgacttcattagtcttcattatctctatttgttgcaacagtgtatccttaccttcatccagagattcaaatttatgttaaaattttaaaagtcaaatttagaaatgtgttgcccttagtattctttcacatttcaacctgaaacaggatcatttcttttgctacagttcttcaaagaggtgtgagaactttcagctctaaaggcaggtgcagcagtttcagagaatttaactgggctcatgtagtaagtcaactagatattatctttttttttcaaagaaaaaaatcaaaatgcccaattacatcacttaacttacttcagatgaaacttttagatgatatctgagatttgcagcatcttaagttgaaaagagaaatcrcttgttaagaatctggtggtttctctgactgggcgcagtggctcacacctgtaatcgcagcactttgggaggctgaggcaggtggatcatgaggtcaggagttcaagaccaccttggtcaacatggcaaaacctcgtctctactaaaaataaaacaaataaataaataaaaaattcgcctggtgtggtggcgggcgcctgtaatcccagctacttgggaggctgaggcagagaattgcttgagcccaggaggcagagaagccagattgtgccactgcactccagcctgggcaacagaggagactctgtctcaaaaaaaaaaaaaaaaagaaaaggaaaatgaatctggtggtttctaatatggaatcagagagcctgaaatagaccacataattagaacattttacaaaagttgaaaggctgggtttttagtccaaatgttgttggtttcttaatattacaggatagttcttataaatactcatattgctaatactgtgaaatacataacatagaacttacagatgtgttaattgtgtttagaaaggcatctggccaactagtgtatgtgttcagtggagcagagcaatttgtaaaagcaggctgagctttcagaagtttgttggagaaaagattaagacctttaagaagccagaatatggttgtttaaaccagaggatttactttttggaaaaacagtaatggaaaaggacttactgtgggtgtaattagttagaataggctttgagtttaattatgcaagtaggtattcaagtccagaggcatttctgaaatgtaagaaatacttgcattttattgaccatgttgagtgaaacaagacttcatcagcatccacaatgtgctagcattcagggttctcaccatttttcttaaagagacacactttacttgtctacaaatattatgagctgcatgataaatgtgaagcatgaaagttgcaggtggtatttgcataatgataaatttcccacatktatttgtatgatggttgtttagatttaaattacttttttaaataagatattttaaaaattgtttcagggaggaattttttagtcggttgttatttatttgtcagtagttctttctacattttaaggacatatgtgaattgttcacttagttaatacaaagtactagtattcccctatgttaattgctgagctatagagatgagatgcataaatcatattttactgttattaaagcaatgccaactagtataatattcaractcagacaaacttcaaacaaaaaagtaattgaaaatatctgtgctttctttattctattatgcctgtcttatcagtctaaaacaaaatagaatgagagcaagacatgatttggatagaaatatagttgttgcttagatgatctctatatcattccaaatgtgactggcctgattatttttcctgataaactgtctaaaatagctcattattttcatgtcatatagacacgaccttaaggataaaaaaattgaattaaatgggcaatatttcagcaatagtcattttccattccagatttaaaatcagaatcgaagaacataatggatttaaacccagttcagtgcacatgtatcaaacataatactgttgggaactatgccaggtagtgattagtaagcttataaagatgactaacaaaaagtggttcctgaccttgttgtctcgtgcagaggtgagagacggttatgatgaaagtggcaacagagctttatctcatcttttctggatgaggactttactctgcctcatgtatgccatgctttcataaccatagaggacaagatatttggcaattctcaggtttacttggtcattaaacggtcaacgcaacaagaatatcctttgaaagccaaagtatttagtgtgaactcaccagaaatcagacaatgaacataccagatatggaataagttggcatttttttttcacttcttgtagagctcttcttaaacttggcacttttgaagactgtactcagagtctagagcagaggttgcaaactggtagcctctagagatagctaggtgtctaaataataactatgttgtgtttggctcatgtagtgtttgtgaaaacatccagatcatttcaccagcattaaaaatcaaaaattcacattaaaacccaaatgtatggattctcttaaaattttggaagatttggcaaaactgtgcctaaaactctctagagctgacttgtgtcttctccttttagataccaactcactggaataccacttcattyatttccttacctgaatgcattctaaagacatttgaatttgtgacttctactttgtggttttcatttgaaaattttagggagcatttatttgtctggcaataagaagtaggttttcagtacttaaatggcatctaatacatggtaggtgttccgtaaatactgattaaatggatggatagatggatgaatggaaagatggatgaatggtggatctgggcacggatgatgagtagaagagatagatagaccaatatatagatacagataagcatgtagatgtgaatgaatgaaattaatattttagtgagagaatgtacatatactaaaaatatattctattctcattggattatgggtagattacagagcccagggaagagttgtagtggtagataactttacctgtagaaataatattttaaaagcattttccctcttgttaagtcagtttcagctacttattagkcagcctagaaaaataaaaaacaaaacctctcaaatgattttaattattttaatatggctaacttgtctttaataaaaaacattttaggaacgttaattgttgaatcaccatatcagctattatttccacttcttattgtattggtttactaggagtgtcttaacaaaatacccctgactctaggtggcttaaacaacagaaatttattttctcacaatcctggaggctagaagtccaaggcgaaggtgtctgcaggtttagtttcttctgaggcctctccttggcytgcaaatggcacctttttgcatgtcctcatatagtggtmcctctgtttctgttgtctgtctgttaatgtcttctcataagracaccagtcatattggcttagggcccgctctaatggycccattttaacttaatcacctctttaaaggccgtatctccacatactgaggtactggggtttagggtttcaacatataaatttggtggggacacaattcatcccctaatacttctatagttttaaacataagccatcatttcttaatatctgtaggttacctgcatcgaaatatcttgcagagctggttatgaaaacatattcttggtttctaccccacatggaaagaattagaatttagaaggaatagagctgagggaatctgcattttaaacaaatatcagagtgaatcgatgcacacaagtttaagaactattgacataatttttctattatttgttggcattaagattttgatacaattcttcttaatgcatgatcaaatctataatgcctaggagtatttattatctttcccaggaagagaagagtactctagtatttgttttgtgcttctttaaaattttattttatttttttaatttttttcagacaggatcttgctctgttacccaggctggagtgcagtggcacaatcacagctcactgcagccttgacctcccaggctcaggcaattctcctgcctcagcctcctgagtggctgggactacaggtacccaataccacacccagctagttttttaaattatttgtagagatggggtctccctatgttgctcaggctggttttgagcctctgtggccagcctgttttgtgcttttatagcatataaaagactaccacatattatgtttaattggtaacagtatgaaatacatattatactgaccatctatagcctaattttattctcatggcaaccctgtggagggggtattgtgaaagggcagtttgcatagagactaagagttgagttttgaaggtagactgcctctaccgcttactagccacgttattttgggcaagttatttaacacttccaggtctgtttccaaacctacaaaatggggatagtataacaataactcatggggttgttatgaggttttcattggttcatacatcaaatctagaaaagcttttgtcacatatgaagtgtgtagtgagtttcctattattacttccaggttggagatgagattggtcttcataagaattaactgacaatgtttacgaattcacacagctaacatacaatagagtcagaacttgaactctggtttactggctccaactccagtattctttccactactctgcgaaaagtatattatttttaagttggcattagctttttcaaattaccacgtgttattttattatttttcaaagtcaagtccttttaaagaggaccaaatatcttataaaatcttttaaatatatatatacttagcatacacaaaaatagaataatggttaaatatgttttagtgtgaagcaattgcgagtcactattgatctctgattgtgttgaacttttggtgatgacttcagtattttgtaatcagccatttacagttcatttatttcaggaattttaaggtcaagctgagctacctatatggaatgaaccagcccagttctctgaaattggtcttcctttatgtgcctagaaatatttctctattagtctgacttctgttggtaggcatggcactttacacattagctaggaagaaataaaatctaatttgtctggacagaatgaaaaaaacaaacaaaaaaaaaacaaaggaaaactgtttgccttccattcctagatgccagtttgctggaatccccctgggaataaaagataatattagatttttctgacctggtaggagaaacaaatcccattctatatgtatgaatgtgtataaattaagatgcatatacccctaaacatataatatgaaactaaaatgaacacagtaagtatatatctaggtttgcagggatttttgtttttgatattgtgttttcttccttttatatggaaaaactcagtacctaaaagggtaaaaaaggatagtataatgaactaccatgtactcatcaccttccttcaataattaccaatttatggccaaccttgtttcatctatatccccacccactcccccactgcacatcattttgatacaatccaagtcgtgattatttcatttcacttgtaaatatttcagtctacatctctgagtaataaccacaatataattatcacatctaacattaacaataatgccttaatgcctagatgtccaggtttagaagtacatatcaagtgacagctcatgaatttctacataagaaggcttttggacagcaatctgattagaagaggggtccaggggacttctctgtatattgcatttatacagcattttagataatattgaaaaagcctcagttattgatattaaataattgggctggaactactgaagaatatcatggggatgagggtgcattagtcttgttaagttgtctgggtgccctcagtgctgacatggttctctaatattcactaaaagtgagcttctaattttagatctagtgtatacagatgttacattaaatgcacagcaacctgatgtattagcataatttaatgcatcatctttaaagtaagccagaaaactgactattgtcaaacagcaataataacaaagtaaaagaaattatctctcagctagatgcggtggctcacgcctgtaatcccagcactttgggaggccgaggtgggcagatcacaacatcaggagatcaagaccatcctggctaacacggtgaaaccccgtctctactaaaaatacaaaaaaaaaacttagccgggcgtggtggcgggcgcctgtagtcccagctactcgggaggctgaggcaggggaatggcaggacctgggaggcggagcttgcagtgagccaagatcatgccactgcactccagcctgggtgacagagtgagactccatctcaaaaaaaaaaaaaaaaaaagaaaaaagaaaaaaagaaattacctctctagaaatgtatttaattaactggaggttgtgcacaattcttttccgttttgtttttcttctcattttcaaaaacctgcaccaaaggatggtttggttttttgccccatcccaccctgatttttacaagtaatcctccaattatttcatatgaatagtggatgtttactccattttacataaaatgctacataaatgcagttccaatcaagtctcctcaccactctgcttgtwactagattggtatcccaatttctgtaaagatgctgttgtttggttgggaggcagggataaaatccagtttgagaagaactcaagtgcctagaaagaaacttagactttatcctgaaatagaaactcatgaaaagtttttgatgcttcaaggggaatgaagatgacagatggggcagatgtacaaagagattatttggcaatcatggaggaaagacggaaaataaggaagaggcggggcgtggtggttcgcatgcaatcccagcactttgggaggctaaggtgggaggatcatgtgagctcaggagtttgagaccagctggggcaacatggcgaaaccctatctctacaaaataatacaaaaattaggctgggcacgctagctcatgcttgtaatcccagcactttgggagkccaaggcgggtggatcacgaggtcaggagttcgagaccagcctggccaacacaatgaaaccctatctctactaaaaatataaaaattagctgggcgtggtggcaggcgcctgtaatcccagctactcaggaggctgaggcaggagaatcgcttgaacccaggaggcggaggttgcagtgagccgagatcatgccactgcactccagcctcagcgacagagctagactccatctcaaaaaaaaaagaaaatacaaaaattagctgggcatggtggtgtgcacctgtggtcctggctactcrygaggctgaggtgggagaatcacttgagcccaggaggttgagactgcagtgagccatgatcacgtcactggactccagcccgggtgacagagcaaggccctgtctcaaaagaaaataaggaagacacttagaaggctttcaaagtaatccaacacaaaatgaagggactccaggtaaaggcaataaaataaggaaaaaagggaacaggcaagaaaaatattattttcgaaaagggaactttcatgctcacagaattagatttagctgttactactgttgttactcattttgactatgctacagtagcaaaccaacatctgaaaaattctataaatatgcctatcattttccgtagacatctatttttattttttgtcattacactgaatatgcaattcatgacatcatttmccacactaggacagctaaggtgtgatagagagaaaacaggatttagagacaggtattggaagctcaactttactacctgttcctatacaacacgagtgagtcatttaatgtctctgagcccctattccaactgagaaagcatgttgtagattatcaggtcctatacagatgtaatgtggtgctgtcgtgcctttaagaaaagcttttggcaccaactcatggattggctgccctttttgttataaggttgaatttatttctatagcaaatacaatcacttctaattctaaagagtctagacatttctatatcaataaatactaatgttttaatgaccatgctgtcacaaaaacaattaagaagcaaatatcatttgtgctataaatatagctttctttctctttctaaataacattaaaaaaaaaaaaaaaacagggtctttctatgttgcccaggctgaagtgcagtagctattcacaggcactattatgatgcactatarcctccaatacctggacccaagcaaccctcctgcctcagcctcctgagtaactggaactaagggcacacatcatcacacttggcttcctaagtcacatttaaaaaaaagaaaaggaaaaaagaattcattttggttcrggaattttgccatactttgtcttttcytttgagaaaagaaaaattgtgttgacgtcaagcctgcttatggaactctggggctttctggtgctggtagatttattcaagtatatacaatgaatattatagaacttactgttgttattcattttgactatgcatttgtcattccatatttcaggtctgttgggaaccaagaattacaaagtgctctaaatttatggctaatgataaatattgatatattaatcaagactaaagctttgatttattattttttgatttgatttattattagttctcatattttataatacttcactggttactatgcgtatgagtgtgatgattggaaaaaccagaggctataaatgcacacatctgtgcattgatacctttaaccattcacataaattatataagtcaagtaggatttcctaattatgtacgatctgtcatatgatcagaagactataggtacatgactaaattttcaagtagcattaaaaattttctctttctccatatatatatctatatacatatatttaatacatacacacacagtcatattatatgaaatgtgcacccctgatagaagtatctaataaaattttgaaaactttttaaatccatcagagtttttattgggcttagatttaaagggagtctgaaaactatttagtttctgcagcatgcatagcaatagtggacaactgccagcaaagggctttatcacagtataaatggggttttaagtgtttgtttccagtgcaggttctcgcagcccaggcacttcccagtctcattgttcctttgttctagcggatgtacaaaggattgactgttttgttttctggctcagaaagattagataaagtctgcatttctgaacttcaccctctagacacgcaaccttaaaatttatttctatatctcatattttgtggattatatatgtttggattctactgatcatgacattattttttaaaatttttatctggcttgatagtacatgtagatgatagtattgatcccttttgaactatcactggaagcagctgtccctctcatccttgtccttaaaatgccacttcagcaaaagtatgtcatctcaattgggtacgacagcattgttcttgagtttcactggctattagaatctcatagactcctctatatcttgttacttttcaaaactgccttggaatataagtattattattatactccccagataggaaagtggaggcttagacaggttaaatagcttgcccaaagtctcatgactttgttagagctgagatttaaatttaattctgactccaaagcccatgctgtctgccattacatttcactgcttctgtggcaatattttcacctaattataggaataataaaaataataacagctaacactgagtacttactacgtgccagatacagttctaactactttttatataatattcaatgtaatcttcataacaattctactaaaaagatattattatcaggattgcataaatgaggaaactgaggcacagggaggttaaggaattgcccaaagcacacagctacaaataggagagcccaattcaagcccgggctgtcaaaccctagaacatatgttcttcaggtgaaccaaagggctgtgctgtggtgtgaaccatgcaaccttgtcttccaagctcacctgtgtttcgggcactctgttaatttttgtcatagttactgctgcctcagcttgcttgtcagctaacatttatgttattattaattattgatgttataaatgtggcatatataattttgcaatatgatgtacttagcataaatcatagcataaaacatagaaacattagatttcataggctctattaagcctatggtgtctattggtcagccatacatagtcttatgagttgtctgtttataactgccttttgaatatagagtaaggctatcttatttcttttatatgtaaattacaagtgaatatcatcttaaaacatataagaaggttatatcttctaataaggtctagaattcctggtgttatattgtgaacacaatatagtctaccaggaagtagtgaagtttctatagccatgccattataatatctgacctgacccttcaatattggtctccaatatcttgatcccactttctagaccaagaaccatgttggatttctgaaaatttctcataaagaggtctctcaatagttctactctcagcactcagggtaggggcagccccttatttcttagactttactccccactgtaccaaaagaatggctgctcactaaatatcattgacttagttcctaatcctgatatgctttttattctattcaagttcaatggtggagattcaacataggcaaagcaggacttctcaaactgatccttggctttgagagttgaaataaggtgaacagctgggtgcaagatttgcccattcccacttactctgggtgctctggcagcaccaaagtgccccaaaattgagattttaaaaacctagggatatagggggccagatgcggtggctcatgcctgtaatcccagcaccttgggaagctgaggcgggcagatcacctgaagtcaggagtttgagaccagcctggccaacatggtgaaaccctgtctctactaaaaatacaaaaaaaaattcaccggacacagtggcgtgtgcctgtaatcccagctactcgggaaactgaggcagaagaattgcttgaacccgggaggcggaggttgcagtgagccgagatcacgccactgcactccagcctgtgtgacaagagcgagactccatcttaaaaaaaaaaaaaaatctagggatatagggaatcccagctactgggagaatccattttggtaagcaaccctatcctaggtttataatcagatgtgtatcttttgtggttgtctaatatctaaaaaccacccaaagttacatatactagacaccaacaatctacaacctaggaagaagttcagtgtatatttcaaattatttcttaatatctagattttctgttgagatcttcagtatttatccaggcataacctggatgtttgtcaatgtttgaaaaagttgctaaactgcaagccaaagaaaatataactttgcttggactttcaagatcagagctaccttaacaacaacaaaaaaagtttcagtagaaaaaggaattcatatgactagtagctaaatgggtttttttttttttaagaaagtgaaagggtaggtttggaagtgaagcaaaatggcaatttatttcacaaataacagatttttgagaaaaatgaacctggactgcagtaaaataagcagttatttgcaaaagtcttcaagccatgttctttttttttctttttctttctttttttttttktgtgtgtgtgtgtgtatttgccttgcagatcctttacctcctgctaggtttggagtcagtaaagagaagacgacttcaaccrgcttgcatgtttggtggactccttcttccggaaaagtcacctcatatgaggtgcaattatttgatgaaaataaccaraagatacagggggttcaaattcaagaaagtacttcatggaatgaatacacttttttcaatctcactgctggtagtaaatacaatattgccatcacagctgtttctggaggaaaacgttctttttcagtttataccaatggatcaacaggtaagacctgtttattttatagctgagtagttaataggatacttttcaagttatactttattcaaggaataggagtaagattgctactccagagcaaagttaattaattagcaattagttaaatttttaaaaggagcttgtgggatacagtggacagactggactgaaaataggatgcgtggctatgctggtaacttgttgagtggttttgaagaagtcatgggacttctgtggaattggagttttctccaacttggaatggatactccctaatggcccttctaactcaaatccaaagcaacaagactttctgccccattttctaagtttgtgccataaaacttattttttagatgtttttattctttgtatactcttctcataacatcaagtcataatgtttcctaactattcctatgtttgaaacaagtctttgtttctccaatgtggtgaaaaataaggcatctgtgcacccacatattatgatatacatggcacatcactacctccttccataaagtacatgtctttcatgtcatttgctctcccctcattttctctcttcttaaatttttttattatactttaagttctgggatatttatactttaagttctgggatacatgtgcagaacatgcaggtttgttacataggtatacacgtgccatggtggtttgctgcacccatcaacccatcatctacattagatatttttcctaatgctatcccttccttatccccctcaccccccaacaggtccccgtgtgtgatgttcccctccctgtgtccatgtgttctcattgttcagctcccacttatgagtgagaacatgcagtgtttggttttctgttcctgtgttagtttgctgaaaatgatggtttccagcttcatccatgtccctgcaaaggacatgaactcgtccttttttatggctgcctagtattccatggtgtatatgtgccacattttccctctcttttttaaatcttcctctccatttttcatcttctatagttctttcctttctctcttctacttactgctgtgcaatgttatatacttcactggcaaaagccaccttaatacctattaagtgggggaggcagacaagtaaattatgatgtaacttgaggctgcagactttgaaaagagcactaatcaaagttccagtgaaatttccagaatcctgttatttactaatgctattatcaagttaagatgtacagaggaacacaaatgaatatgtgacttctaattaaatgtgtctatgtctcctataagggaattattaatgacatttggacatgcattttatcccactagtgccatctccagtgaaagatattggtatttccacaaaagccaattctctcctgatttcctggtcccatggttctgggaatgtggaacgataccggctgatgctaatggataaagggatcctagttcatggcggtgttgtggacaaacatgctacttcctatgcttttcacgggctgacccctggctacctctacaacctcactgttatgactgaggcygcagggctgcaaaactacaggtggaaactagtcaggacaggtaagttccccctagctagctgaagaagaataaagtgaaatcaagggaatgtttaataagtcaagtttattatatgaataactgtaatataggacaarttgaaattcttataaggtatagaagacccatatccacttttctactcagaaaaagaaggattctcttttattctaaagtttaggctagcccttggcaacattttgaagtaggcaaagttaattactgatatggacctagcttctcttcttctctttttaatactctatctccttgctaaggattcctacttmcttttcttaaacaggcaactgctgtctttatgacatcactcacagtgaaccagagttactttctccatgctatacataccctactcctgtgtgacagtcatttccaaaattttctatctaaccatatgacctgggacccaataccacaggacctactcccacagcctaccctagactaataaatgaatctatgctaagtattaatgagtaatttatacaaactttcattcattcagccaatagttattgaatgtaagctagatgctgggcattgctgatataatatccaagagagacaaagtctttgccctcacagcgcttacattttagtagaatctaatgcttctagcaagtctaatgtgtgaattaaatctcctctcttggtaagttatctaattttaagagaaactctaatatatgtagtgccttagacattagtttctggaactatgggaggctggtgggaaagatatttgaggacaccrgtacatttacataccttttataacacacctcaaatatatgtagatattcctggccaaaaatgttctatatatcttaaaagttatttatgtacatcaagagcaaattgcattcctgactgccttgtgcaaaatcagagtgctgtgcccattctttttttttttttttttttttttttttgagacagagttttgctcttgttggctgggctggagtgcaatggtgcgatctcagctcactgcaacctcagcctcccaggttcaagtgattctcttgcttcagcctcccgagtagctaagattgcaggcacctgccaccacgcacagctaatttttgtatttttcgtagagatggggtttcaccatgttggccaggctggtcttgaactcctgacttcaggtgattcacccgccttggcctcccaaagtgttgggattacaggcatgagccactgctcctggccgcccattctgttaaggaagcttcattaatttatattctagaaagagtattcaccaaagggtatctcctttttaatcattttcctctgatgaagtagtaacacaactcattaactttatcatgatttaatataaaaattaaagtagttttatcacataaaattttgtaatcaatcaattgatcgatctatttactatgtactcaatattattgaatattaatatataaaggcgataagaaatgaggcagatggcagacctttttgtgcattccacttaaagaatttctgaactggaaaggaccattgtaggtctttgacctagcctcatttgccaataagaaacaccataaggctcagtgaactagaaagagctgtccagagtttcccagctgactaatggcccagtctgaaccagaatccaggcttctgcctgccaaggttttggccttgccactaggcatatagcctacctttggttttacaacattactttttgcctctttaaaacctttttttatttttattttttcaccatctgaagaggataatatttgcctcttgaagtgcttgttttctccagagcaaggaatgtggcttgcagaaataaaattacaggtcaaaatttggccataggacttgtgagagatcctgagtaaaagtctcctttctgttctttcctgattagcccccatggaagtctcaaatctgaaggtgacaaatgatggcagtttgacctctctaaaagtcaaatggcaaagacctcctggaaatgtggattcttacaatatcaccctgtctcacaaagggaccatcaaggaatccagagtattagcaccttggattactgaaactcactttaaagagttagtccccggtcgactttatcaagttactgtcagctgtgtctctggtgaactgtctgctcagaagatggcagtgggcagaacatgtgagtcttgggctccagaatgttccttggttgctcaaatcactctctgatccaccttaaaataggacaaaataagtcagcaggaaaactcctttcccaatctgagaagtggagcctatgtaactgaaggtgtctgkagtatggcccattcttctgagtcacttaggcaactgagtttggatttctgaatgatctgcatgttgtttctgtcttatgctttttcatgtcacgtcacttaagtagcataaatgcattagcattgataccagtatataaaacatttctgattcattcttacagtgagaaccagttagcatttaaccatgttttccatacattattttattaatttatgtcctcacttatctatccagtgccttatatatgtaaattactgtactattgttaaaacgactaagacatgctacttgcctttaaggcaggatccagcagactaccccatctggtgccaaatctggtctgtggcctgattttgtttagccctcaagctaagagtggtttttacatgtttaaagggttgtacaaacaaataaggaaacaaacaagaaaaagatgagacagagaccatatgtgtsctgcaaaacctgaaatatttactacctgatccttacagaaaaaattgtccaactcctgctttagaaaactttcattttaatcacacagatgtggaatacacacatgtacaaaaataaaaatagtacattttaataatagtgactgtattgatatttgcatgtatcaggcactgactaaataatttatayccattatttcatttagttctcacaacaaaactgtgagagatgtcttgttatttattaycattatacagataattcaaagaggtcaaataatttgtccatagtcatccagccagtaagtggtagagctagaatttaaaccaggctatttgattccagagtccattctctctgctattagagatctgaagtaagagatatatggtcaaaaaggaaagataaaattttctttcataagagcagtaraaacttggaggaaatgggagcagggtgcggtggctcatggctataatcccagcactttaggaggctgaggtggagggttgcttgagcccaggagtttgagaccaacctcagcaacataatgagacctcgtctctacaaaaaaaaaaaaaaaattaattagctgggcatggtgacatgtgcctgtggtcctagctactcaggaggctgagctgggaggattgcttgagccctgtggttgagccatgattgcatcacttcactccagcctagcaatagagtgtgaccctgtctcaaaaaaaaaaaaaaaaaaaaaacttggaggaaatagaaatgatctttaataaggacctaaaaaatgtaacgtttgtgacaaagagggaaaagagggaagagcttttggggtggaggggacaaaataagcaaaggcccagaggcagaagggcccaggagacttgcaggtctacagaacatacaaccggaagccagctttccaaagggtagggaaggagagaggatggcttcagaaagtagtctcagttaagactggaaggatatggggtctgaacttaaagagccaaaaatgtaagcagagggcttgacattttattctgcagattatagagagaccttgaatgtttttaagcaaaaaaaaaaaaaaaaaaaagaacttaatcttgcaagaacattaatctttttagttggaaaagaaagaaaggaatgcctcatgatcacgacatccaatatctcttmcaaaggatgccacatatcactagattattaacactacaacagaagattacattactgatatcactaaaatgattttagcggacatttcttgtgtgtcaaatgtctccgaaataaagaacactcatttgcaatccacagacatcaagaggggatagaaatgttttgaactgcagatattgtgtctcctatctactgctgcccaagaaaagtaaatragtatccttacttttggtctgtaatatytcctttttgacatcatttcaccrtttagttccagacaaagttgcaaacctggaggcaaacaataatggcaggatgaggtctcttgyagtgagctggtcgccccctgctggagactgggagcagtatcggatcctactcttcaatgaktctgtggtgctgctcaacatcactgtgggaaaggaagaaacacagtatgtcatggatgacacggggctcgtaccgggaagacagtatgaggtggaagtcattgttgagagtggaaatttgaagaattctgagcgttgccaaggcaggacaggtaggcaaatatgaagatgttaataccaatggaagagtaatttgttccctctcccaggtaacccaggtaactgccgtaactgctaatatcataccctggtgttttctgaatttgagatattaaggactttaaggctaacatggggtttctaacacctaatttgtcaaattagaacatttaaaatcacttccactagtaactccattatttcatgaaagaaagccatttcaaacaccaaaagagtaagatgcatacattctgaaaacaaacactgacccttcccacaaaagaagaaccttttgctagtgatcagcattagggaaccattgccttgacctcatgttgactaatgtggggatttcaggtaccaatgaagagtgattaaagtggagagggatatatttggattttagggaagggaagaataaggatactgaaatgagaaaacaggctcaaagaggttataacttgcccaaagctttgcaatataatcgtgacagcaagaataccaagactcatgtttcagtatcctcatactgtcaaatacttgtactcatattgtcaaataagagagttgcacttccaagttcaacatttgcttgataatccttgtaatgtgaaatactccatatttagagtgaaattcaaataccttctttcttagttcgcctgataatagggaaataactacatggattcactgttcttcttagaacaatgtcaaagaaaaggatcatgacacccacttagcttgccaatgtgtcttgcagtaatctcctcatcttccaaatattaatatccactggatgatgatcaaagacctacagagcttaaactaagcgacttttagtatttcacaggacaagcatctctgtcatctccaatattttatcactcacctcaaataacttggaaatggaagatcacagaacattaggggctctcagcatgtcagcataattctcaggagaacttttatttatttatttattatttttacattttgagacagagtcttgctctgtctcccaggcctaggctggagtgcagtggtacaatctcggctcgctgcaacccccacctcctaggttcaagcaattcttgtgcctcagcctcccaagtatctgggattacaggcgtgtgccaccaggctcagctaatttttgttcttttagtagagacaggattttaccatgttggccaggctggtctcaaactcctggcctcaagcagtccgcctaccttggcctcccaaagtgctaggatcacaggcacaagccacggcgccaggccaaacttttgtttttctttttctttcttttttatttttgagatagagtttcactcttgttgcccaggctggagtgcaatggcatgatcttggctcgctgcaacctctgcctcccaggttcaaacgattctcctgcctcagcctcccaagtagctaggatcacaggcatgtgccaccacacctggctaattttgcatttttagtagagatggggtttcaccatattggccaggctgctctcaaactcttgacctcaggtgatccacccgcctcaacctcccaaagtgctgggattactggcatgaggcactgcacccggcccaaacttttcttaaactgtgtctctggttcaccttattcaggtaacttgaagtaggcctcgatgtaaataatcaaattatttctctataccgaagaaggaagatggagagttagggactcaattagaatggatttatagaaaatttatggatgcaaaatttacaagaaaatttttaatacttgattctttcataatttaaggcagcaacactttattcttttcttttcttttcttttcttttttttttttttttttgagacagagtcttgctctgttgcctaggctggagtgcagtggcaccatctcagctcactgcaacctccacctcccccacttaagcaattctcatgcctcagcctcccgctgagactacagatgtgagccaccacgcccggctaatttttgtatttttagtagagatggagttttgccatattggccagggtggtctcaaactcctgacctcaagtgatccacccgcctcggcctcccaaagtgctgggattacagatgtgagccaccgcacccaaccaacagtttattcttaatgtctcctagaaattttaacaataaaaccttttaaaggaatcaattttgagataagtcctcaattaaatgctattattgccagccaactcgcccttccatgaacacatcagtgtcccccacctcagaaatgagggaaagttgcacttggtctcctcaacctatgggggtaacaaatactcctaactccacctaaatacttaaacaggaacttttctttgtgattttgtgaatgacaagattggagtaaatatttttgtattacagaattcatacaaaaagataaactcaaagtattatacagtcaaaaatcaatgactcttctggcaagatgttttctaattgagtctgtatttctggttacattacatgaacaaagttttttgtgataagattttgttttaatgctcagagacattcataaaataaatgttgaactgaaacacgcttaaggatggaagaggagaactatcaaaagtataccctatgaatatgcctcagtccatcaatgacccatctccattgctttttcctcagtccccctggctgtcctccagcttcgtgtcaaacatgccaatgaaacctcactgagtatcatgtggcagacccctgtakcagaatgggagaaatacatcatktccctagctgacagagacctcttactgatccacaagtcactctccaaaratgccaaagaattcacttttactgacctggtgcctggacgaaaatacatrgctacagtcaccagtattagtggagacttaaaaaattcctcttcagtaaaaggaagaacaggtagtaacctttataaattttacattttaaagtgttctgtctgctgaattactatytaacatgcaatttacaagtattcattaactgcctattatgtactgggcattgctttatggatcctttctattgtgtttgttttctattttaccaattgcagttcttatctttattagttccttctttttactttgcttggatttagtttgctaaacttgaaaaagagtaaagaacaaccgtttcaaggagttttgctgtaaaggagagcagagaaatagggcagcatctagaagaggaactatggttgaaaggaggatgattttttaaaggcagaagaaataacagcatgttttatgctggagggaatgatctagaagatgtagaagggaaatcatgatgatgtaaagtgagagggaagaattgctgcagttattccatgagtaggcaagaggtattgggatctagagcacaagtgaaggaattggctttagaaaggagcatggggaatctaatctcaatgtcagctggtatattagtctgttttcacactactataaagatcctacccaagactgggtaatttataaaggaaagaggtttaattgactcacagttccacatgactagggaggcctcaggaaacttataatcatggtggaagttcagttagaatggcgatcattaaaaagtcaagaaacaacaggtgctggagaggatgtggagagatacgaacacttttacactgttggtgggactgtaaactakttcaaccattgtggaagacagtctggcaaatcctcaaggatctagaactagaaataccatttgacccagccatcccattactaggtatatacccaaaagattataaatcatgctgctataaagacacatgcacacgtatgtttattgcggcactattcacaatagcaaagacttggaaccaacccgaatgtccatcaatgatagactggattaggaaaatgtggcacatattacaccacagaatactatgcagccataaaaaaggatgagttcgtgtccttggtagggacgtgaatgaagctggaaaccatcattctgagcaaactatcccaaagacagaaaatcaaacaccacatgttctcactcataggtgggaattgaacaatgagaacacttggacacagagtggggaacatcacacaccggggcctgttgtggggtcgggggtcgggggagggatagcattaggagacatatctaatgtaaatgatgagttaatgggcacagcacaccaacatggcacatgtatacctatgtaacaaaactgcatgttgtgcacaggtaccctagaacttaaagtgtaataaaattaattaattaattaatttttaaaaatcatggtggaaggtgaaggggaagcaggcaccttcttcacaaggtggcaggaggggaagtgatggagatgaaaggggaaagagccccttataaaaccatcagatcttgtgagaaatcactcactaacacaagaacagcatgggggaaaccactcccatgatccagtcacctccctccttggacacatggggattacaattcaagatgagatttgggtggggacacagagccaaaccgtatcagctaggaaagagagaatatgtgggtgcagatgccaataggtggrtcgttgtagggtgagcagttatcttctaattgctttcatttttttcagtgtaattggaagcaaagtcatcaagatttccctttttagttggacgccgtggctcacatctgtaatcccagcactttgggaggccgagatgggtggatcttgaggccaggaattcaagaccagcctggccaacatggcaagacactgtctctactaaaaacacaaaaattagctgggagtggtggcacatacctgtaatcccagatactcgggaggctgaggcataagaatcacttaaacccaggaggtggaggttgcatgagtcgagatcctgccactgcacactagcctgggtgatagagcgagaacctgcctcaaaaaaaaaaaaaaaaagaaatttcttttttcaatgtatatactattgtcctgtatcttatttttctctcctcttttgatcccacaaaaatataattattgctttatatagtcaacatctgtttagatttacctaccaatttactaccttttttctcattttttcccccygcatctgagatgttttatctgggattattttcctttatcctggagaacgttattcaratttcttcattgagagtttctagggacaaactctctcaaattttgtttttgctgggcatatttttatatagctctcatttttatatagctctcggtcttgaaagatattttccttaagttccaactctgtgtttaaagttactttctctcagcacataaaagatattattctagtctttctgggatttattgttgcgctgagtcagctgtcagtctgatttttatttctctatgagtctgtttgctatgactgcttttttgcctttggggttcagttgtttcacaataatgatcaaggtgtagatatayttctttttgtttctcttgctcaagattgattggcatttctgtactttccaactagtgtctttctacaatcctggaaattctcagctattaactctctaatattgcctcttgccccttctccattccccactctgtcatcttctggtattctagaacacacatatatgaacacatcaatatatttcatattttccatgtgttttctctctgaactacagtataggtaactttctcrtatctttgattcatttcattaattctttcttcagctttgtctaatctattttaaaatctacccactgttttaaattttaattgttatgttcacttttaagcattctctttggctctctttcaaatttatgttgtgctctgttgctctttagttatattttcattcccctcctgtattgttatatgcaaattaacaatgtttattttccatcctatgtctgataattataatagctgaaatcttcaggagttaagttctgttgtcttttgattttcctgccttttgtttatgttgctttatttctttaaatgtatgtgatttctttttactgtaagcctgttttccctagaattttattctgtggaaattatttaaggccatgtttgaaggtgagtttcagaaagaattttcatttgattctttcaggtgcacaagactgctatcaaaccagacctactttaatctaaattgtcaactttaggttctttgatcacctgggttttataaattcaggttgcaaacacattgaaactatcttaaggttatgagttctcagaggaaatcgttttctccatccagtattaagaaggctgaagttgtatggggagtaaagagagactatttatttcacttatacttagaatgtagcctttccaatgttatgcaaggtcagctatgagtttcttcagcctggaaaaatctacactttacctcctttctccaatatcctgcagtgctataaaatcaaagcttacatttgcatttgaaaggtgctctcaacacaacagttcgctttatgatccaattacctctctatcctttactttttgscctttgagaatctcttacattcctgacaagtcattcatttacattttcayattttatccaatatgtatagttgtgtttattagaaggattttcatggtatctagcctatcatactgccagaaagggaagtccaagacattgttttagacctaaggtcatttttatcatccccaccacccatattgctgggtcatatggtaaatgcatgtttaactttgtagaaaactgccaaactgctttccaaagtattgtaaaattttacattcccaccagcaatgtatgaaatttccacttcctccgtgttctcagcatgtagtacatggtattagcagtttgttttaaaatttagccattctaatggaatagccattataataagataatgatagctcatgtggttttaatttgcctttttctaatgtctaatgggtttgagaatcctttcacaagcttatttgtcacccatttatcttttctggggaagtttttgttcaaatattttgctggattttaaaataggattgtttgtttgtccttggtcaaaatgttttctgtcggtttttcattttgatgtccaatttatcagtttttttctttcataaatcatgctgtggtgtcatatctaaaaatatttgcctaaatcaaggtcacaaaggttttctcctagaaggttatagttttaggttttaaatgtaggtctgcgacccattttgagttaatttttatatatgatgtgagatataggtgaaggtttttttctttgcatatagacatctgataattctacctctatgtattgaaaagactatcttttctccatgaaattgcctttgaatctctaaaaaatccattgatagcatattcttctatctctgggctctcaattctgttctatcaatctatgtttctgtctgccctttgccagtattatcctgtcttgattacaagatttttagtgaaatcaggtggtgttagtcctctaactttattcatctttttcaaaattgctttggccactgtagctgtttgcctttcatataaaatttagaattataattgaatctttagaattgaatctgatccatatacagtaggatttttttaatgaacgcttttgtatcttaatccagaagtcaatgaactttgaraaagaggggtgccaaggttccagtccctttgattattgtaattcaggaaagaggcacaaagaagaatgtatgttgaccaagtgccaacttcaagatctgtgtataagatttgttaaatgataagttggaagaaataaatgttgttaattaggaaaargacacaggcttaggggttagataaatctagctttcagttccaggttggctatttgttagcactgtgatataggctaaattacttacattttatgatccttggtttccttgttaataaatggaataataaagtcaactttatagagttctgaatgggtgtcaaataatgtaacctttatgagacatatagctcataactggcacatagtaggccttcagtagttgttgttattatcattattttttaatatatatattataatttatattattatcacatgttcatgtataataacagcccctttaagaatgtgccagtatagaactaatcagtttgctagaccataatcaacagactgaagggaattcccaataccaccccataacaatcattggctcaggtagattagatagctttgaattctcatggggtaaggacagataaaatcacattaactaagcagttttcaaaaatagcagccttcattatctaaaatttaaaatcaaaaccacttaataagcatgcatcatctcatctttggatsttaaataattttgattccctatataagcagctttttcaaagtactagagcctctctagaggagtagttctccatatgccacaggaaatagaactgagagtctatagcaacaacacaaaaattatttttagtactttcaagtctgtctccattttttgactcatttttcttacactttcttaaggtgactaagtgtcatttgttttttcttctgtctactgttttagtgcctgcccaagtgactgacttgcatgtggccaaccaaggaatgaccagtagtctgtttactaactggacccaggcacaaggagacgtagaattttaccaagtcttactgatccatgaaaatgtggtcattaaaaatgaaagcatctccagtgagaccagcagatacagcttccactctctcaagtccggcagcctgtactccgtggtggtaacaacagtgagtggagggatctcttcccgacaagtggttgtggagggaagaacaggtaagaagtagagatatgtgtctgtgacttaactaagatctgagtacatgagacccctaatcagaatattatagaaatatcctaaaatcagactcatccctggcctttacaaaagctaagtttcacaaaagctagccatccagaaggtatatggaatggaaattgggcgatgggtgatgkcaagagagaataaattctgatttttttttttttttttgagacggaatttcgctctggttgctcaggctggagtgcgatggcgtgatctcggctcaccgcaacctccgcctcctgggttcagcaattctcctgcctcagtctcccgagtagctgggattacaggcgtgtgccaccacgccctgctaactttgtatttttagtagagacagggtttctccacgttggtcaggctgctctcgaactcctgacctcaggtgatccacccgcctcggcctcccaaagttctgggattacaggcgtgagccaccactcctggctgaatattttaacatctccaatgaacatgtaagaactcctcactcgatgtctagacttatccccctattcagttgatttcctttgaaatgtttatgttccagttaaggtaaacaataatggataaaaaacaaaacaaacctcccaaagaaagcatctttcactcttatatattcttggtttgcaagacataaaaagaaaatgatctccaattaatatggttagaggtggagttgatctaattttcaggtctcatatattttcataagcaacgttaaacaagtgcttaatatgctatctaaacaatttttcttgaccttaatagctccctgttagaaagctaagtaaacaaataagtgtcattatggtcatgtatgtcagggagccatggcacygaggaagaaattacatagaattttctatgtaatacaatgaaagaacataaaaaattaatatatawgatatataaaatgtatgttcatttcttagaaaaaaattacataaacccaatagaagctttgataattattagtgggaccttgtctacttaattttatataattattttaagttggatttcaggcttctccttctgcatcctcaacactcaaattctgtttatcagctgcaggcatcatagatgcatctctttccaaaatcatgaatctcatctacttaatgaacccagaggacattaacttcattaactctcccagaagaacaaygaagtcactgagaagatgtttcatagtcttggtagaaattcactggtgtatgcccatttccctcattctatgacagctgacattgtcacttgcatgtttcttttttttttttttttttttgagatggagtctcattttgtcgccaggctggagtgcagtggcacgatcttggctcactgcaacctccgactccctggttcaagcgattctcctgtctcagtctcccgagtagctgggattacaggcacgcaccaccacgcccagctaatttttgtacttttagtagaaacagggtttcagcttgttggccaggatggtctcgatctcctgacctcgtgatctgcctgcctcggcctcccaaagggctgggatcacaggtgtgagccactgcgcccggcctgtcacctgcatctttctccctgatattttctttcctttcttttaatggttcttggcaccatccattggtgtagcatacttgggggtaggkagctgaaaagcttagcatggaaatcaggaggcctaggttttggtcctagctctgccattaacttatttccctaagcttctgtgttttaatccacacacaataattcactcctaccctgggtgtcagaatagggaaggagaaataataaagctgaggagaggagtggaggacgaccttgcattcatttcccagtgatttgcagttgtatcagtcacattagactgatttaattcatgcttagacactgtataatgtgggtgttcatgattggatgcctctattggttgggatacagtctcctactatcagtggctcttctttgctgtaggtcctcagagctctccccatttctccagagaatggaggttggggaggggtacaactcatcagacttgggagtaggcatttcacttccacccacattccactggccagaactcagttacatggctacatctgactgcctgggagcctgagaaatgcagtctagctgtgtgtcaagaggaaaaggaaatggtcggggaaccatattctgccacacaggttgattctcattttatataccacaaggattgtccaacttattgtgagctactaaaatagtctagtctgtgctatctcttgaaataactgtgtactttaagtaagtgggacttaaaattatttttattttttaatttatatttttatttatattttaattagaataaaggtacaagtatttgacccatattatataatagaagcattcaaaaaagggaaaaagggacaagaaattatttgaagaatggtcataaagttttgaggagagaatcaaatatgaataaattgagcacgagttattttactcaaacatatgaagagtgcacattatcacgataaaggaggaaaatgggagactcctgtaaagcacaataatagggattttgaaaggtgcctcttttagtaaattttgtacacagtcaattgtaaagaattcagtgggtaaggccttgataatccttatcatctcctcaaattgctgaaacattagtcaatattgaaataattttgaaaggtattcttatatttcacctgtttccactgagttgaaacatataaataaaccctcccagcccagataagatggcagaatatttaaaattaaagatattagatatacttaacaaatctaattctaatctgggaaaatgctcatcctaaagsaaaaacaaattttgtatctattttttcttaaacatgtgaatcatatttctgtgaaaacttttgataattgtgycttttctaataaaatgttagtagttgcaaatatttccagcagtttttaaaaacaagcataatgagttgcttttgagagcaactaaaggatgtatagatggttggatggcagaagaaaggaaggaaagaaagcaaaaaggaagaaaagaaggaaagaaaaggaaggaagagatgtaccaatatataaatcttctggctaaaaagttcaactttatatctaggaaatgtccatatatgtggatcaacattaccagagttgttcactagaatgcagtttataatttttagtgatggataagtgcttttaagtataaggtatgctttggggcttaattcacaaagtccgaacatattacattagaaggattctcagaagtcatctagccaaatcctgtccattataagtgatgtactgatattgacaatcatatgaaactgttaagttaatcaactaatgattaaaacagtagtgtagttcatatatactgtaatattttaaccctatattcatttatggcagtactatttaatgggcacctatttctgatatgtggttcaacttttactcaatactgcaattactaatttgctgactatacctccaaccagagaacttcttgaagacattcatgcgtttttcatttttgtatacctggcaaatagtaggttctcagtaaacgtttgtgacactaatccccaattcatataagcaaatgattatagttgacatcagaaaacccattatcgccataacagttctctctgcccttggttggtccagcttccagacttcttacttccaagataggtttttaggcttatttcttaccactagagggcaggaaatgccttgcaaagggaaaacggtccctctggttgtgttagctattacttcccaggaatraataacttcatcacaaaaaaattgaagctatcccagtttaaggtctttagaaaagctatcgtattcttcccctttccactcaaacatttttgctttattggtaagtttggttcaagttgattcatttagattgttgaaatatttgttccctttcttacagggaaccttctaaaacattgtataaggatgtctccacttgaaatgctttacaaacagcaaccccataaaaatgcagtagtggcatccttgtatttacgaggcatcccaaaggcctccggacatttttattttgattagttttctgatgtaagaacactcagcttctggaagctgagtgaaatcctcacgcttccttgacctcttatataatcagattagatctcctgagtgagtccacggtttgtgctgactgcaatagacgactcaaacttttgactgtgtctttctttttgaatcccccttcccccccccccccgccccccacctttcaaaatcacagtcccttccagtgtgagtggagtaacggtgaacaattccggtcgtaatgactacctcagcgtttcctggctgctggcgcccggagatgtggataactatgaggtaacattgtctcatgacggcaaggtggttcagtcccttgtcattgccaagtctgtcagagaatgttccttcagctccctcaccccaggccgcctctacaccgtgaccataactacaaggagtggcaagtatgaaaatcactccttcagccaagagcggacaggtaaggctgtatgaaggttcagggctccgtaagaaccaattcacatgtggctcagggcaccacagagctgtagcaattctgtaatgatgggatgaaaggcccttgagatcacaaaactgttatgaagtcttcgtattttaacccaagaaactccttatgtgagcagaccctgtgtgactagaatttatattatattcaaatagtgaaaaaagtgttcccgtttatggagtactttttggttgctagggcctggctttatatatcttaactataactaacccttatgaactccttattgaggtagtcattgttattattcccattttacagatcaggaaaccaaggttcagggaggtcaagtaactcgcccaactgtttaccttgttaaacagccagtgtgtttcagatcctggttttaaacccagttctgaatgactccagtgcctacaaagctctccatcctaaaatccatcctgaaatgtctgttggtcaaaaccactattcatcctttttcacacaaggtgaaaatgtgaacctttatggttctgggactagggagcaaaaatcttagcaaaggaaaygaatgttcagtccaatgtgctggaaagaattaaatttaaatagctaccattttcccaatatatttatgctttctggggtttatacctgagatttctgcttaaggttggcatcaatacattgtcaaatgtttcctactaagctatgggttgatttctgtattttaaaatgtcagtttttccatgaggttctgagacarttgtccttatcctgttacctagcgcaggacctggggcttagtaggcactcagtaaatacttggcaaaggaataatcagaaatcacttagatcaggggtcccacctgggagtccatggttcatgggagactttaggaatgtagtaacccctgarattgtttatgaggttgctggggataggaaaggtatatgcatttctttgagaagaaacagtccatggcttttatcagattcttatggtttctgtgacctccaaaaagctaagaacctctgatttatattgttacaggatgctgacattgaaggggtccttagaatgatctaatcctgtttcctcatttggatataaaggaagtcccagagaaggagtgtggcttctccagggttgcagggctgactggtagtggagttcagtctagctccagtgctgtccattccatcatgctgtatccgagagcactagtcagggatataaagagattatccctacccttgaataatttgaagcccaattacactgacaatcacaataatgacttagatctgaaaagcagatttctatttacaaagcagtcttatgtcagggtctcatattgatcaacttggagcctaaaaatcaccagaaattaaaggatgtgttacctaactaccaaccccttgcttcctaccaatgtcaattcatgatgatttcctatccgtatgactttaatattgccaagtcttttgctgagattgttttaaaatgcaagaaagtgattctttattcagtgcatcctcttgactccttgaccggcatgaacttggacttggtacacgactaatggaggcaaatcattgcccctgacaaatcagtttaactggagggtcatgtctgagttgttctcttgatgattttggctgattatcttaatgcccttttccatttctgatgctcttgttctacattttgggtgaaaataccaatatttctaattctgtatcacatcatctcactgtgtagcaaggcaggtctccacaaattaccccgttccacctggagagctccttattgacttaacgtgatattcagccaggtttttcttcctgtaatagttgctttgcctttagcaaattgcctggatcattgacctttcttagcccatgcataaaatgccayttcataatttcctytccttaactctgtgatgactgtattctaacaacactgtaattggttttaggtaaatatcttggagaaagcatatctgtccttgctccatatctgtggtgagctatattccaaacactaatcagtaaacacaaggcaacaaaggatgctaatgcaacttgcagktgtgagaaaatggagcttccatgccaaaatactgaaatttctggatcatttcatgatttgagaaaaagtagaggtgaaaaattggacacagccttggcatgtggtcagatcagaaacccctaatatataccaaatacagaggacatgctagtattaggacaagagtttagtaccctggatccgagttcatgcctcttttcaatgctcctcctcattaatatgtataatgtccagttaccgtgaaatagtaatgaatctgtggcctactgttgaattaaaattcagccccaaatggaaaaatgaaatctccttaatatmatgctctaaatacagaattgccttattccacagtgttcctaagtaacatgcatatatttatttactggttggggaggggaccacagatatacagaatggtttcrttcatatattagaaagaacctcacatgcacaaaattgtattaatcataattcttggttcaagaaaccatgcatccccagcactttgggaggccgaggcgggagaatcatgaggtcaggagtttgagaccagcctggccaacatggtgaaatcccatctctactaaaaatacaaaaaattagctaggtgtagtggcaggcacctgtaatcccagctacttgggaggctgaggcaggagaatcgcttgaaccagaaggcagaggttccagtgagccaagatcgcaccactgcactccagcccgggcaagagagtgagattctgtctcaaaaaaaaaaaaaaaaaaagaaaagaaaagaaaaaagaaaccatgcatcaactgccacctttactttttaggcatctagttagtaatttttgataatttaacatgtacacaagaaaccaaccagtacctaaaataaaagctaggaccttgacaataacctacatcaaagtatgtggtccccacctcgtgaattcactcaaaggtagccaacatcttgactcctatgttcacctctcccttgctttccatcttgcatagttttattgcatttatatacaggcctaaaattatgggtttcaaaattttttgttgtttttaacattatttaaaaaggtatttttaatgtagtatttaatatcttagggacttagatgttttacttattatacaggtaagattcatccatattttgtattttgatgttaaggacaagaaatccatatttttgtgttttgagttaaggaattaattataactattatataatatttcactgtgtgtgtgtatgtgtgtatatgtatgtattcattatccagtctcctgtatatattcttctacacrtggtttttatatagttttttaattttgccagtcaaatggatgtaaaacagtatttcactgtggttttgacttgcatttccttgatcaccartgatgtggaaaatctcttcatttattatgcaaataaccatatgtgtttcttcttccatttttctttttccttttcttttcttttttttttttttttkatgagatggagtcttgctccatcacccaggctggagtgcaggggcatgatgtgatcttggttcactgcaacctgtgcctcctgggttcaagtgattcttccatctcagcctcccgagtagctggaactacaggtgtgcaccaccatgcccagctaatttttgtattttttagtagagacggggtttcaccatgttggccaggctgttctcaaacttctgacctcaagtgatctgccctcctcagcctcccaaagtgttaggattacargtgtgagccaccatgcatagcctcatttttttgaggggggcgggttgggggattgcttatattcttcttagtaacttttgagtcagcaaggtatgttggaattatctatatcgtttaccatcactcatattaatcatcagccatcatgtttaatgttccatcttatacatgacactttgtgcaggcaaacagcaggcttagaatgagttcatcagcttctgttaaaagatccgtttaatcactccacatagtgtaacaatctttcccctccagaaatttgtaacctaaggtctaagatttttcttttaaatgcacacaataataatctactctctctttttattgtcccagcttgtcatctgtgatcaattactcactcagaattmataaatatttagttactctctgtttccttttcagtgcctgacaaagtccagggagtcagtgttagcaactcagccaggagtgactatttaagggtatcctgggtgcatgccactggagactttgatcactatgaagtyaccattaaaaacaaaaacaacttcattcaaactaaaagcattcccaagtcagaaaacgaatgtgtatttgttcagctagtccctggacggttgtacagtgtyactgttactacaaaaagtggacaatatgaagccaatgaacaagggaatgggagaacaagtaagtggaacgattgcaaaatctgacagttggttggacttgaaagtctctagtaatttatctgaaccttgaatwttttctgcttattcattagtacattacattcccagtaagtctcacttggygctaacatcattcagccaagccatggcctataattacagaatatttattggtagataaaagcaaacatagtgagggagcaagaaggctaaatgtcccatttttcttccctatcttcctgcatcatggcatttagattctagacttcttgttttatcttatgattgagatcataactcattttataattatgttctaccaatgctgatcatgtaacatttatgtcaggaaaaaaccacaatgttaatagttgcttccaatttttcttgtttaattatgcatgaagtagtgctagtggtttatttggggaagggagatgttgccagttccttgaatgtgattcataaattattatgtaggtaaactctgatcagttcctttcctgaaatgtcttctcatttttctccctagttccagagcctgttaaggatctaacattgcgcaacaggagcactgaggacttgcatgtgacttggtcaggagctaatggggatgtcgaccaatatgagatccagctgctcttcaatgacatgaaagtatttcctccttttcaccttgtaaataccgcaaccgagtatcgatttacttccctaacaccaggccgccaatacaaaattcttgtcttgacgattagcggggatgtacagcagtcagccttcattgagggcttcacaggtaatgtgaaatactgttcttgaacctgaatagatgcagtggtgcatttaactttygggtagttcaggtatttcgattgagcatttggagggrtaaaagggagacagcaagaagggacaaagtcatgttgatagtgacaatgatgttgtccaacctggatgaatgaaaataaagtatgatgtcagcagagagtggcggggttggagggtgctttcagagaaatagcaatgaactgatgtgatcagctggtgcttctgaggcacacagattaagaattaagtgttacttgggtatcacttctttagaactcttttaggagtgttgccatagtagttaacatgtactgacagttcaccatgaaccagacccacagcaaagcattttatgtctacatcttgttcagtcttcacaatgctttggaagccaaggcaggaggatagcttgagcccaggagttcaagcacagcctgggcaacatgacaaaaccctgtctctacaaaaaatacaaaaaaattagccgggcacggtgttacgtgcctgtagtcccagctactggggaggctgaggtgggagaatcacttgagcccaggaggtataggatgcagtgagccataatcatgccattgcactccagcctggacaacagacagagaccctacctcaaaaataaaatwaaattaaattaaaaaagaatcaatcttcacaactctatgggctggttagtattatcatcactgccatttttcctaatgaagaaactaaaacttacagaggtcaagtaatttgcctgtagtcccacagctagtgagtgagaaaaccaaaacttggaccaagacaccctaactagcccctcgctatataattagcattcctcatttccactcaccggctttgacttccccctaagctttcccccatcaactttagttcacacagaaaaatcagagaaaagtggcaaattgttactttctttttcatgtgagttctctcagtgggtgccaaaacatcagaagcattcaaaactttgtttgaaaatktcaacagttcattctctaagtgatgacttttaaatttattttctgttttagttcctagtgctgtcaaaaatattcacatttctcccaatggagcaacagatagcctgacggtgaactggactcctggtgggggagacgttgattcctacayggtgtcggcattcaggcacagtcaaaaggttgactctcagactattcccaagcacgtctttgagcacacgttccacagactggaggccggggagcagtaccagatcatgattgcctcagtcagcgggtccctgaagaatcagataaatgtggttgggcggacaggtaagcatccacctggagaagggctagattgtagaatgcctcatggttctccaaaatgggacagtgaaygggctcagctattcacaaatccagatttaaaaccaccaaagtttgtacaattcaatggtttcaagagccttactcatttattctttgtatttttctcttaatagagatctgcaaaacaaatgaaagggaatcagaaaccaaatcatttgaacacatttttatacttgctaaaggataataaaattttaaattttaacaagcaggctgggcacagtagctcacgcctgtaatcccagcaccctggaaggccaaggcaggtagattgcttgagttcaggagttcgagactagcctgggcaacatagctaaaccccatttctactaaaaayacaaaaaattagccaggcgtggtggtgcacacctgtagtcccagctgcttggaaggctgaggtggaagaatcacctgagccygggaggtcaaggctgcagtgagtygtgatcgtgccactgcactccagcctgggcaaccggagtgagaccctgtcccaataaataagtaaataaataaataaataaattttaataaggagacttccataattatgcatttttcaaaagttctaccttttaagaaagagtacacatctgtgccatctactttacctggtagagctaaaaaaacaagtatcaaatgtatgaataatatatctgtttatatcaatatcactattcatgtattatttttgaaagatctctagccatactatagttctcttacagatgaggaaagwacagttcagaaagcttgtaaaacartatcaaggatacgtatataacaagacctaaagctataattcaagtctaggtctgtctggccccaaacctcgtgccctctccactgtgacacaatacttcttagatgtctcccattctcatgaccacttatttagttgtggggtctggggcttctataccatgccctactatgcctctatttcatatctatatttatatctatatctgcatatctttaaccctatgacaaatcctgtgttagaagtgggcattcgggccaggcrcggtagctcacgcctgtaatcccagcactttgggaggccaaggtgggtggatcacaaggtcaggagatygagaccatcctggctaacatggtgaaaccccgtctctactaaaaatacaaaaaattagctgggtgtgrtggcagacgcctgtagtcccagctactcgggaggctgaggcaggagaatggcatgaacccaggaggcggagcttgcagtgagctgagatcatgccactgcactccagcttggtgacagagtgagactctgtctccaaaaaaagaaagtgggcattcagtagcaaggcaaagcccctgacctcaagaaccttataatctagtgaaggagatagaaaagtaaaaaggcaattacagtaaaacatggtacgtgctaagaaaaaagtggttatgagatgttagaggagcaaacaagaagagtcagggaaggctttcaggaggaagtaatatttaaagaaagactaagaagtcatccaggtgaagtgtaagttgtcttcgttccaacagagaaaacaaagccctggaggtgagagaaaggatggcacatttgggaacctacaccttttttagtatactagaataaaggccgggcacggtggctcatgcctgtaatcccacattttgggaagctgaggtgagtggatagcctaagtccaggagttcgagaccagcctgggcaacgtggcaaaaccccatctctactaaaagtataaaaagcaaaagtatactagaataaaaaatgtgaggcatgtggccaggtaagtagagagaccaaatcacaaagagctttgtttgcctgtgaaggtgttttggaattatggagagccactatagggccattagcatgggagtgctatgaaaatatgctagatagrgtctgcagattgaaagagtaggaggtaaggacacaagtgactggtcaataggcagttgcaataatgtatggtctcatttatacttgctaaagggtatgatgtggtcctgaggtagtagcagtacacaaagagggagtggctagattcaagagatagaagatttaggatacagaaataaaactcgtatttgattatatatacaagggtgagagtgataactgaagtttctgacttgaaccaagagatagaaacaaaaaaacaatgagaatattgggggagggagatgaggagtccaatttggrcrtcttgagtgttggatgtctgtgrtacattcagggagagatgyaatttgcaaaagcaggagaaacatctraactgaaagtttaaatttgggagttgtcaccttatggatgacacttcaaaccatggacatagacgaaatctaggaagattatgtagaatgagaaaagaaatgaacctagtacagaaaatattattataataacaataatactattttgcctttcacctcaggagctatagaacaaatactagtatccactactgctgaagtcaagtcttgaagttttgaccttagttaatgttagtaataaaagtctaaacaagagacataattcagctrtcaaacccacattcactgaayatgaacttgctcagcattcttcactttctagattcataggtatgcaccactctgcatatttatcagggccattttcactaacttttctatctgagatcctatttaaawtcagagaaaaaatggagaatcaaagtagttgtacagacaggttaagccaacaaatcctttctcctcttttctccataagggcacacagaaagtgtcaatgacacacaaataaagcaaatgcatcatcttctacctgcagttgattcaggagtttttctcaattgatgactttaccctaagtgataaaatctgtattttgttgctccacttgtctctctgcagttccagcatctgtccaaggagtaattgcagacaatgcatacagcagttattccttaatagtaagttggcaaaaagctgctggtgtggcagaaagatatgatatcctgcttctaaytgaaaatggaatccttctgcgcaacacatcagagccagccaccactaagcaacacaaatttgaagatctaacaccaggcaagaaatacaagatacagatcctaactgtcagtggaggcctctttagcaaggaagcccagactgaaggccgaacaggtaattagcacagcataatgttttgtagcacatattgccaatgtctgctattgtgtaagaaccccagggtgagagggatgaagcaacattgggagatgatatctatctcttgatacgctgggaacattcaccctgatttgccayttccatgtcagttgccctatccacgcaggactcagcccaccacactctgtttctgatttttcattaatattggtgctattagcttcctattgctgctataataaactatcacaatcttagtggcttaawaccacccaaatttattattttctagtcctgargattagaatctgaaaatggttttttgggactgaaatcaagacaacagggctgtgtttcttgtagasacyttagagggagaatccactccttgcctttttcagcttctgaggccgcccacattccttggctcgtgtccccctcccaacagtgacattgctccaatctctgcatgggaccttacatctctttctctgctctcctgcctccctcttccatcttttaaggactcttgtgattaccttggtcaccaaccggacaatccaggataattccttcgtctcaagatccttaacttaatcacatctacaaagccctttttgccacagaaggtaacatattcacaggttctgggggttaggacatgracatctttggggccattattcagacaaccacattggcctaattgattgataacttatttattaagtacataggtctgaaggcggggatggttatgttgacagggacataaagatgaatcaggcatgcttctcgtccttaaagagctgactgacgagacagacacatggacaaataatggcaatgcattgtgataaagagtacatataagagagggatgtctggcattcagggaagcatggaggtcaggtagaattgagacatcttcataaaagtgacatttcagtactgccttgaaggatgaagaaattctccttatggagagaaggtagaatactttgtacagacagtctgtcctgtgcaaaggccaagaggtatgaacaggagaaaggagaagttgtgggtggctgaaatgtgtgttgcatgatggaaaggtgagrctgaaagccagattggagccaaattagagggtgcctggtagccttcctcaggaattttatcttaaagcaatacaaaacttttagccagagagtaattgttttgtaataaaagatgtatctttaaaaagataaatcagatagcaatgggggaatggattgaatggaaatgaaccagaagtgaggagatccacctatcaattcatttattattgagtacctactataggctaggcactgttctaactgctggatatacagaagtgaataaaaaaactcccatggtcattatgtttatagtctagtggggaagaaagtcaataaataaaataaataagtaaaagatgtaggaggttgggtggtaataaagaccaagaaggaaattaagttaggaaggtgggatagcaagagttggggcttacaattttatctatctatttattattattattattattattattattattattattattatttatttttggagacagaacctcgctctggcacccaggatggagtgcagtggcacaatctcaattcactgcaacctctgcctcctgggctcaaacratcctcccatctcaacctcccaagtagttgggacttcaggcatgtgccaccacacccagctaatttttgtattttcttgtagacacagggtttctccacattgcctaggctggtctcgcactcctgggctcaagaaatccacctgcctcaacctcccaaagtgttgggattacaggcacgagccaccacgcctggtcaaggggcttacaattttttttttttttttttgagatggagtctccctctgytgcccaagctggagtgcagtggtgcgatcttagctcaccacaacctccacctcctgggttcaagcaattatcctgcctcagcctcccgagtgcataccgagtgggactacaggtatgcaccactacacccggctaatttttatatttttagtagagacagggtttcaccatgttggccaggctggtcttgaactcctgacctcaggtgatccaccctcctcagcctcccaaagtgctgggattacaggcatgagccactgcacctggtcrggacttacaattttagatagtacagtccccaaagacttcattgaggcagtgacatttgagtaaaaatctgaaagaaatgagaaagtcatgcaaatatttgggtatttataagcagagccaatgccaacacaaagaccttgagtgggtgtgtgtctgacctgttggaggaacagtaaagaggcccatatggctggaacagagtgagcgaggatgagtggtggggatgcagatggacaggtaatgggggtcatgacatgactgcagtcataggatgataaggaccaatagctgaatgaatgcaggggccctggtgaagaatagtgggtacagtcaagaaatatttttgcattagcttaagtggcacttgggggctgagtggattatagaggaagggacagaagattccagagttttcacctgggatgtctggtagaagatgatgccattaattgagatagaagaaggaggagagagggtcaagcaaaactccagagttcagctgtgtattgagtttgagatgcctgagtgacttgcagagagaagggaccataggtatttggaaatatggatttgagctcagaagagaagtgagctggacataaaaagatctggaccagaatgctagttaaatccataaattgaatgagactgattgctcagctggggctatagaatatgaaggaaacaaaggatggatccwtgggaaataacaccttgtaagggcctgacaaaaggagaggagaaagcaaagagagcctgagaaagagcatttggggtggaggaaagagaactcaggcgaaatcaaggcagatgtcstgttctgtttctactggcatcttaagacttctgaggaatcaggcagcatctgtgccagcagtttgcaaggaggtggttgctagcagcacttgaccttgccaagaggtagcacagaagtccaaaagggtttgcaaaattctaacatgaagatttttgtaaagtgcttttggcttttcctattgttactgtttcccgtatcactgaatccaacttcctctttctgtttgcttttccctcttccccacctgctcccttctyctcactgcatttccctccctcattctcttgctcctcgacttttccagtcccagcagctgtcaccgacctgaggatcacagagaactccaccaggcacctgtccttccgctggaccgcctcagagggggagctcagytggtacaacatctttttgtacaacccagatgggaatctccaggagagagctcaagttgacccactagtccagagcttctctttccagaacttgctacaaggcagaatgtacaagatggtgattgtaactcacagtggggagctgtctaatgagtctttcatatttggtagaacaggtaagaccaagacccaagcagtaatgaatcgtgggggaattgtcccggtattcactggcttttccttggttggtccttagtttcctattctattcaggatgtagctttatatggcatttgtgactttcaggctgtttgaccctaaatcgcacctttgattatatataactaatttgtggcyagtttttgcactggcttctgctcttttgcctccacttatttacttcctagggcttggtaaaaaatgaatgcggttcctcctcttgccatcaaactgtacaagagggctgtaacccatcatagtttaattcgagctacacccttcagctttctaacaagaaatagacggagaggagagcaggagcagagaagggcaaccacaaatataacaaacaggcagtgactgctgcgaattagaaacacagcgctagatgaagtgaaaacacagagttccaggaaagtgagagacatctctctgggctgcaaacaaaaaacagaatctacccttttcccataatttgagtcctttatctcctgttcaaaaaaaaatgttttggggggggacgagttctcactctgttgcccaggctggagtgcagtgatgccatcatggctccctgcagcctcgaccacctgggctcaagtgatcctcttgcttcagcytcccgagtagctgggactacaggcacacgacaccatgcatggcaaacttttaactttttaatttttattttttgtagagatgggggcctccctgtattgcccaggctggtcttgaactcctgggctaaagcaatcctcttgcctcgacctcccaaagtgctggaattagaggcgtgagccaccacggtcagcccacctattcaattcttttttctcatttgacaatagttttaggtgctcttctgtgccaggcacatggcccactgctgtaatgtgacggtgaacaagacagtcaagggccctgccctcagagaactctgcaatagcggggagggaagaggacaaggacagatcatcaaagggagatgatctgggaatgccttaaattctatgaaaaaaatgatgtgtcatgatagtgacttggcaggacaagcaactgctttagataggagaaggcatttcagcagagacctaaaggtgaggggagccacgtgggaacatattccaagggcacccaacagaagttctgtttgtcttttgaaaggagtgaaaaagagcagcgataagcttcaaccacaaatagaattgcctagatgtcatcatttctgaggcaacccaccctttgcacatctttccttacctgctcattaatgcttaaaggtcycccaatgtggcaacagtcttcattctccaaaaaatagcaaagctattgggataggtggcagcatgactaatctatacagtgataggagtgactgttaacacttctctccctaaatgaagttgtaccaatacagattttataaaaaagagcacaagagaactgagaacctaaaggagggtacagaggatgtaaagagacccagagagggttgttatgggatggtggctgcaatgagataggccacactgggaggagctggaacctcgtatatacattttctgggcctttttcrtaagctaaatgacaacgatttattcatcatttatgaagatttcattttacatgcctatcagggtccatgtggcaagcatctagaagtcaccacctggtttgttttgttttaatttataccatatctctagtccatatgcccttaaagttaaatggcctgaaatgtaggcaagatctgactacaatatgtaygactcacccacatgcccaacatagcatatactctcacctgtgggccaaaatgcctgtgtttctgttttgttctcagtaacaatttttcttctgtttaagtcccagcctctgtgagtcatctcagggggtccaatcggaacacgacagacagcctttggttcaactggagtccagcctctggggactttgacttttatgagctgattctctataatcccaatggcacaaagaaggaaaactggaaagacaaggacctgacggagtggcggtttcaaggccttgttcctggaaggaagtacgtgctgtgggtggtaactcacagtggagatctcagcaataaagtcacagcggagagcagaacaggtgagaagcccaggtgccaatggccaagggatggtgggaagtagcttccagagacacattttgattctgattttaatgacaagagataaagccaataatgatataccctgagctagcccctgaatttgggaagggactgtggkacaacagataaaggacaaggctttggtccaaaagaaatatgtccttagcttagctctatgaatctgggcaagtcattgagcatctctaggcctcagttttcttatctgcaaagtgggaataatcatatacatcatcactgtgtggctatcaccagtgcttcctaactgtttttatgtcatgggcacacanagakgtctgtgtgccaccctggagttaatcaacaaggctatctgcaactgaacataattgtctgtggacgtcagccctgtaccccaaaatctgatggaattaatatcttcacacacttgtaacccattcagggcacactcatgctccacagcaccatggtaaggaagatctggctatgaatatttaagaaaaggtatatgaggctgggcaccgtggctcatgcctataatcccagtactttgggaggccgaggtgggtggatcacttgaggtctggagttcgagaccagcctggtcaacgagaggaaaccctgtctctactaaaaatacaacaattagccaggygtagtggtgggcacctrtaatcccagctacttgggaggctgaggtgcctgtaatcccagctacctgggargcggaggttgcagtgagccaagatcactccactgcacttcagcctgggcagcaagagcaaaactctgtctcaaaaaaaaaaaagtgaaaaaaaaaaaaaaaaagtacataaaatgctcgaagacagtgccttacacataataaacactattaatgaaagctcctgctactatattattatcatattatctcttcctacaaagtacattaaaagtgtgtctgatgttrctcagctatcttatttgtatrtgttatggcatagctgtgattatgtgatttttcactttctcctacattcagctccaagtcctcccagtcttatgtcatttgctgacattgcaaacacatccttggccatcacgtggaaagggcccccagactggacagactacaacgactttgagctgcagtggttgcccagagatgcrcttactgtcttcaacccctacaacaacagaaaatcagaaggacgcattgtgtatggtcttcgtccagggagatcctatcaattcaacgtcaagactgtcagtggtgattcctggaaaacttacagcaaaccaatttttggatctgtgaggacaagtatgacatgttttgctactcttatttctcaaatggagtagaggaagtatatgttcaacatcttactcaaatagggcttggattaaatccatatttttacatgggattggtctggatttgaattcaggcagaagtctctgyagatttgttcgttcattcaacattaacaacaagggacaataaatctctctctgccctcatggggcttacaattaggtaggacgtactatttgtaaatagacattatattttgggtgtgatgagggaagtaaatggtactatggagacacttgttaggtaatctgacccaatacaagagaacttcttggaaaaggaaacatccaaatagaaacctaaagcaagagatttaccaggtagaggtaggggaagaagtggagaatattccaggtagagagaataaaatattccaagatgagagaggagggagagtacaagatctaccaataggggaacagaaagaagtttatttggccatagcataaaaggtgaggattaagggaatcagataataaaatattttgtattccatggtaactactttgaactttattttgaaccaactggagccactcaatttcagcagagatatcataatcattatttacactttagaaagttactctgggtacagtgtagagaatagattgaaagaggcaaaactagaagcagagggatcatagttagcayatactgctgtatgtccctgagataaaaatacttcgacgacgaagcatataccagtttcttcccaaaggcattttgggatagatactatcaccctcaaagaaagacaggtattcagtgtagggactttaatccaaatatttgtgtttcaataatacccagtataagtagcttctgggatcagatcagatagttattggttrttgataaaatacatagttgaaagttagaaatttaagcaagtagttgttttatttttttaataagcattaatactataacaagtataacttttatgccacattgtatccaaagagcagttatttgtgtgtcaagagaaatatgtgaaaaagaactaagagttttagtttatggcgagctcaggatgagttttccgtggctgactgtgggctgtgttcatgaaatctgctaagcagaacaccctgcactggttaccaaacccagggcagractctaaacacttctgaccattgcatctggtattagagtagccagggaaacacaatgcaaacactggatggaacaaagctttacttacatagagaggagacagagtaagatcagcctcaacagtatgcatcagtcccccacagccagctrcagtagttgcccagagatgcacttgctatcttcaaccctgacaacagaaaacagaagggcgcattgtctgtggtctcttccagcagccaatggagggcagttggctaagtgcacccctctcgggccacagtagaaggaccctgtcctgtctcctcagaggacaactatagcattggtgttcgccatctaccatgtgacacacatgcttaagcagaacaaaagagcatacattgagcttgcaacagggaatgatactcccacacaaggcaatgagcccagcacaggstgtgtaggctctcsatctcttggtaagaaagtatcttaagctcaagggccatttcttacacagccaaatgggggttgatagactatgcacatgagactgcctttcccaacagcctcgcaggtgctcagtttaagagctcatacaactctgttagaggctaggcttataagtcacaactggactgttgtattcagtcccgggtgctagaatttaagggaggcatttaccaaaagggggagtgcccaagaggacaaaaactgccatgaaagagagactcagtgctgtttcatgaggaatgattatggtggaacttgtttttgttttgttatgttttgttttgttttcttcgaggcttgtatttattaggatcgggtgaggctatgggtaacagaaaatccaaaatagcagaagtttaaatagaatagaagtttataattttcatgtaaaatcattccagtactcaatttctcacaaatatgcttcaaccataatgaatgatttgcagttctcaattttctaccatcccactccggcacctcctcctttggtacctgggtttctggtttttctctaygtagaatgcctctttcgtgataccttggcagagtgtcacctctgccttacagcttttactaactcctgctgatcactaatagccagcagctaaaagttgtgtgtcacaccacatagcaccttctctcaccatttcttctggtatgttttcctttctaccttgtgttatggctattttggactcatttccattygtagaggttagagctaacgtcttatttacctctgtactgttcataatccccagaagagcacctggcacatagtaggtacttgtttctctcaacacgtgaaagaagtgttcactccactctctttttgtttgcatggcttcagaggaggacataattcttaactttgcttctctatatgtaagttgtttttccccctctggcttctttcaggaatttttctttatctttgattttctgtagtgtgaaaacgatatgcctagccatagtttttttggcatatatcctccttggtgttttctgagcttcctggatctgtggttggtgtctaacatttatttgtgggaaattcttagtcattcttgtttcagatatttcttctgttcctttctttcttcttytggtattcccattttgtgtaggatacaccttttgtggttgttccatggtccttcgatcttctgttctgcttttcagtctttgttttctttgctttttccatttggaaggtctctattgatatatcctcaggctcagagactgtcctcagccacgtctaactattaataagcccatcaaggcattctttaactgttactcagacttgtccacacctgtcctccagcttttcctaccccarccttggttccctgggagatttatgctcatgtgtctctgctagggtgagccacgacactctgtatttgcctgtctgtccctcctatacctagatctcagagctagttggacccaaaggagctgaaaaaaaaaaattctccctgagttctgaaaagtgttgcctcctctgtttcctttagagcctgacaagatacaaaacctgcattgccggcctcagaactccacggccattgcctgttcttggatccctcctgattctgactttgatggttatagtattgaatgccggaaaatggacacccaagaagttgagttttccagaaagctggagaaagaaaaatctctgctcaacatcatgatgctagtgccccataagaggtacctggtgtccatcaaagtgcagtcggccggcatgaccagcgaggtggttgaagacagcactatcacaatgatagaccgtaagtgtccctggaggtgcgcacagagcytcytgtcactggagtgaaggggctgtgcacctttctctatcatatccatcactgctattcacttgcatacacttcacttttgcataagcctgtctgattgccacctggagaggaggacctaaaagtctccagaaatggaaacatttctctgggtaaagtaccctgacagcaaacaagttagatggtcttaaagtacctgaatgagttagtatttaaatatatcactttgcctcatatagttagagctataatggagctcttaagcaatttgaagctacaacttcaggaaattctgctgaagagctacctctttcattatgtttaatgtgccactggcaaatcacttcctctgcctgttttccttcaggagarggggagagtttcttgattacagcattaaacacaggcacacgctcacacacacacagtytgatgcaggagagcagaatccttcatttcactaactgttgtttatgctgtgaaagcagagttgtgacccctcttggttccttccccacctctttttccaggcccccctcctccacccccacacattcgtgtgaatgaaaaggatgtgctaattagcaagtcttccatcaactttactgtcaactgcagctggttcagcgacacsaatggagctgtgaaatacttcacagtggtggtgagagaggctgatggtaagttatcatgagttaactccactctgagacacagaattgcttcctcagaggtcatgtgggagatctttctgtgacaaagtttaagaaacttaagtagaaaatgkaatttttgtatcattcacccctctctctgctggatacagggagatgtaagaaaaagctgctcaaaggctctttgggcaataaagcctgttatcctctgggtttaattattaaatagaagagtaatgataatagcaaccacaacgataataacaataaccatcatttattgagcccttactacgtgctgtgcactattggaagtgcattgcatgtaatgccttattcagtcctcttcattattgggtcagtcttgttcactactcttttgttctaccattaaacattaatatgcctcaactgtcttcacccctccctgtctcaaatgcctcaactgatcatgcttgcaaaccacccaccaagtcacaaaaataaccaaaagcttaaaagaaggaaaagatgttcatgaaaaacattcttcccttctccactgaattttgaatagttttattctctagtttcctaaattattcaatatctacctaattcctacagataagaacaaagtctagggaatagttatcacaacatcacatacaaccactcagtatgagctttcaagcttattatatcagcatttgtcaaaccayctgtaagagtgttgtatttggggcacacctgtccatatatgtattcgccattgaggtcttgtgtgttatttctccaaaagagatgcttgtgcctggaatgacattaatatagtttacctttcttatatatttttatactgtttaaggtgctgcatgagtttcttaagcatccctrataattttgacccatttgtgggtaagggggaaacttgaaacctgacaaactgtgaggagtttctaggccaatgggtattttaggctcacagtatctaacagtctatgtgctttcacagtttatttaattgtactaaatctggttatgcacaattaattaaataatttcaagggtcagtggtgtgtcccagatttcctcacaccacataattgaagataaattagtgaactgtggaaagactttagacttaattagactgcaatgaagacagtgttttgctacatgaatatgagacagtaaccaaaaaagtcacaccccagaaagtagccttgtgttccccagccagacagccttcccattattgatgtccatggagatgagctgtgatttccaggttagctaagataacaatccatctcatataaacgccatttatagtgtacacactcatgctaaagacaacatttctttttaactactgccaacaaaatatttctaagactcacttatgagcaaattttattaaacaasaatccaggatgctatgataaaccctcactgcaccacttcttgaagctcattgtaaatagtatctgatctctatagtatttatctttctacttacgcttttctccagccaacatcaaaactggtttgcagtgccaaaacacacagcaggctgggtggacaggggaagagttctgggaagtgctctgagtaaggggccaaatttggatggggattaaactgtactcaagataacagatccacatgcagagcaataatcaaactgggcatgacatgtggagcacgccttgtgggatgactgctctggcctaggacatgatttctcttatctttttcctatttcccaggtcataggggtttccttattagctcaactacaatggttattggcaagatagtttatcaagtgggttcactcacaatgggagttgtccaacactctggagttgtgagacatgctmtcatttaatgcaatgagctacccttattttatttcctaggaaaatgatgctgtgtgtgtgtgtattttatatacrcactatttatgtattttggaaaaagtgaattaaaattaactttattaggagaatttcacatcgttytttgagattgcagaatctgtactttggaaatggccagagatagtggatgtggaggcagccttagaaacctaatttaaaatcactgaaatcacctaagtcacaagaaaggcagtccttaactgtgggttttctcctccaggcagtgatgagctgaagccagaacagcagcaccctctcccttcctacctggagtacaggcacaatgcctccattcgggtgtatcagactaattattttgccagcaaatgtgccgaaaatcctaacagcaactccaagagttttaacattaagcttggagcagagatggagagcctaggtggaaaatgcgatcccactcagcaaaaattctgtgatggaccactgaagccacacactgcctacaggttagatatattaccactgttttgctagaagggacatgctacattactaagcactcagctgtctgagcaactgatgcatgcgagcttccatagattaataacctacgttacaagagtactgtgcattttactgggtaatttataaacgttggattcctgcctccacttgcaggtaatgtgtcaaaagggacttcagcactatgcaaaagctccagttcattaagggaagaactgaaggttcttaatagattgttctttcttctacaactttcattattttwttttttttttttttgagacagagtcttactctgttgcccagactggagtgcagtggtgccatctcggctcactgcaacctctgcctccctggttcaagcaattctcttgcctcagcctcccaagtagctgggattacaagtgcacgccaccacacccggctaagttttgtatttttagtagagatggggtttcaccatgttggccaggctggtctccaactcctggcctcaagtgatctgcctgccttggcctcccaaagtgctgggattacaggtgtgagccaccatgcctggcccttctacaactttctaaatatgagtccaatactttactttgctcattattgtaaaaatttccaaataaaatgactgagtttagggagatccaaaaacaatatgaagttatatcttctacttataatgtgaactgaaattatactcacttatttaccttctaaggcatctaaagatggaagcgctctttgctccagacagaactctggaaggcaaagacccctgaatgaatgggaacacscttttttccccatggagatgactaatgaaaaggagcagctgtctggctttggctccaggaaacatcactgcagtcactaggcccttcggccctaggaattggcagtgctcttgttctgcactgtgttttcagaaagcaggtacaagcagaagtatatagcatcccaatcagcatcctcaagagaaagggaacctaggctaccrtcttggatatagagctactgacatccaacattattacttctgcagaggatgtaccttctctgttgggtgttggaagagctgatacctaaccaatatggcagtaaattaggttttccatgggccagtgttcgttctgctttgttgatgctgaggtcttattggttctcacatatttgaagtatcactcctaggtctcagtagaaaaaaaaactctcctgccacttccaaaaggagactatgacgtactgttacacccaagagagttcttagcccctccctcacatcaaaaaagtcagacagatgtttttcctaaaacaaagcactcatttttggcaggaactctgtaaagctacctttacccaggactcaccagacagttactgttacctcccaggcaaggtcagcacctccagattaaacaaacacaaactttttagtcatacttacttcaaaaagagaccatacaagcctacctaaaggaaacaagatttcagaagaacaagggagaaacatgaaagatcagaaaaccaggatttatcagttcctgtaagaatcaagagatgcggctgggcgtggaggctcacgcctgtaatcccagcactttgggaggccgaggtgggcgaatcacttgaggtcaggagttcaagactagcctggccaacatggtaaaactccgtctctactaaaaacacaaaagttggccaggcacggtggtgcacgcctgtaatcccagctacttgggaagctgaggcaggagaattgcttgaaccctagaggtggaggttgcagtaagctgagatcatgccactgtactccagcctgggcracagagcaagactccatctaaaaaataaaaaagaaaaaaaaaaagattcaagagattcctcakctccttggttacctgggctcaaggaaactcragcaaaagtcacctaagggctattttctttttgagttggaaaactgaagctgatttagtttgtttacttatggaaaggggaggggtgaagataactcattactaaatttcaaagagagtaagaagctataaaaaatttgtgtctggaccagagcccaccaatctcccagcacccatagtaactgcggaggtctttggaagagcccctgcatttgagttccagcyctgccactttttaactgtgtaagcagcatttcaattctctaatcctcatcttcctcacctgcaaagctccataaggttgtcctaagtagtagtcctgagtatgtgacagatcaaacctagtcatgtcccttctaaattaaggtttycccatagttcccattcacttaccagagcaagagcagattccagtacagggcacactgagccctgctttctcccgcctgcctcaccagccttgtctccaatcgtatttgctccaagtacccactgctctcttgctactcctcactcctcagagttcctgaatgtgacatggttcttttatacgcctgagcctttgcataatcttttcactctcagatgckttccgctcttatctggctggcgaattctctgtacacttcaaaagccagctcaaccctcaaccacccacactatcctrtcagcccacagctgggcagttgggtgctccatcagccccatgtccacgtccccatcaccgtctgcctacattcctctaatcctacatttacagtggcttttaaccctttatcgaattacctgccctctttactagactgcaagaactcacagtccaacaggggagacagatgtgtcattggttacaaaacaatatggcaagttcctggcacaaaggatgtgcttgtgaaatgtttatgaacaaatacgggaatgagccaagatgctctaaggatgtaacacattcgtgttatggcttcatcatctctgtgtacatatttgtttttcagaacacacctttcctatatttctccaatatatatgtttacttcagtcctgttaaaagcatgccagacagataatgcttgatgagaggaggtgtcrtctcccaaagcacatcagagaaccacatgcaaatcagcctcttgcgtggtggctgctgaactcagtccagtcagaattctgcctgtctcaagacagtcattaccacagtgaccctccttgttgttaggcatccttttttccaaagcgaataggtggacaggaaatagcacggtaaaagaataattaggattgagaaatgggaaatgctaggtttagctgatacgcaagtttattatgtcaacagatataatgtgtttcattcattgttgggttcctatgattcatatgttttattccattgttccatatggaaagagaaagggcagatcattatggtgagagagagttggaaggttaggaaagtgctggtctggttttgtttttattctaaatagaagagcagtgtgaccatagtaaggtggtcagcttctcctgacctcgttttcttcaaaggaaggaaattgaaccacatgatctctaactttctgctatagaattctgattctggacacatttaaagtggaaaaaaatctatcagatatttgttcattaaaaatagtgtcttgttattgtgtcatattcataattatctttctataatatattcagcacattttattgccttatctggcaatacgtgttgttgggtgatagataaataaggtggagccactgccttcaagaagcttacaatgtggagacagaaagaagccacatctgcaaaatagaggcagaaatgttgaaggacataaggaataaaggaaaataaattctgtgaaggttcagaaggcttctcaaaggatgtattaaaacacaggaattaaaacataggaaaggatttagaaatacccagatagggacagaaggagattcaatgtggaakgaatagtgggagtcaaagygtggaggtttaaatacacaaattgtttagagaagaacaaacagtccagtttcaaacagagggtgaataaaaaggagtagactgggatgatwggacgagagaggactgtgggtgggtgctaagtgctgggctggggaaagtagttgtgatattcatttttggaaaagttttaagggaagagtgcctgataacccattaattttaagctgaacctatactagrtaattatctccttcctaaaggtcctttttatctgcattcattcagtactttgtgtttacacttgtggtttcagagcagaccatgtcaaggttgttatagccaatgcttttattttacagatgagtcataaagaactttagggaccattcaagtagccagcaatggagtaagagtgagaactagacttcagatcctcttgttcctagcccaggcttttttcatccttcctacaaaagtcatggcgtgtgtgtgtgtgtgtgtgtgtgtgtgtgtgtgtgtgagagagagagagagagagagagagagagtcttgctgtgttgcccaggctggagtgcagtggtgtgatctcagctcactgcaacctccactttttagattcaagcaattctcatgcctcagcctcccaagtagctgggactacaggcacgcatcacacgggcctggctaatttttgtatttttaatagagatggggtttcaccgtgttggccaggctggcctcaaattcttggcctcatgtgatctgcctgccttggcctcccaaattgctggaattacaggcatgagccactgtgcccagccagaagtcattgcttttaaccaaaaattaagccatgaggaaataagaaaagagatctgcactaggagccagaaatatgaagttcagttttcgttcatatctttctgtgtgatcttcgagaagacatggactctctcctagcttcaggttccaaacctctgaagtaatataataaacttctttattatattggagaggttgaacatgatcaaacagaaacatgtttgaaaaagtccttatggctgggcgcgatggctcacacttgtaatccgagcactttgggaggccaagacaggcagatagcttgagcccaggagttcaagactagcctgggcaacatggcaaaaccccatctgtaataaaaatacaaaaattagctggccatggtagtgtgcacttgtaatcccagctactcaggaggctggggttggaggatcacttgagcttgggaggtggaggttgcagtgtgcattccaacctggtgacagagcaagaccctgtctcaaaaaaaaaaaraaaaaaaggaaggaaagaaaagaaagaaaaagaaaaaaagtatttccacacttataaataagaaactctyatcagagagacactgaatttccaaatgtataataaattagcaacatatttgccaaggcattggtgttatggtggttagcatagctgccttccaaaattagcaaaacacaccaactcctcaccttcccctttaatgtgtggtgactacttgtttccctttgtggacctttctcaatatacttccattaacaggctgttattcctggaagaacaccttttgacttggaatggatcttttggagatggaagttatagatgtgatttatcaatatcatcttgatgttcattttacaggattacactcggatctgggcataagtcagaagaagcgggagcagggtcagaacaatttgccctggcctagtaccgcttcagcattatcacaggacatgcccagatacctttgggttcaagaaatatagattttaaaaaaacaaaaacaaaaaaaaaaaggagtacttctcgtcactttcatagaattgaaattaacactagcaaaagttttcccacataaaccaagcctaatactccatcagttcaattagagaatcttcacagtaggagggacttaagaagtcacccaagccaatctttaacttagagcagcgatgccctcctccagcttccctgggactgcttctcctccagcctccctgggactgcttctcctccagcctctactagaatcccactcccatcttccaacccccagtgactgggagctctcaacctaggaggcagctcatattctaatgttagaaaacagcttaatgttcctaaactcctccttccttataaattcagcctacagagcctaattcttccttcaagaagaaaaataatcatgttgttttcctcttctacatggcagtcttccttaaatctgaagctaactatattatgtcccttgaagtcttctctatcattgttcaggtcagtcactcaaatgatctctaattcatcctaaaatatgcccccagaaattgagtgcagctctccagactgggctgacttatgcagagagcatgaaacttaggtcctatgatagggatcacaggcttctcattcaagcagaggttacaaatctgtgtgtttgtagctgcatcttgcttgtttattgaatttaggaccagctgattttcaggcactatcccacatggacatgtggacagccacctcagcaactctcctgctcaggtgactggaataatgccagtgtcagctggatagttgtaaatcaatgcctcactgtccctctaaatcgagtatatcccaagcaaagcatatcctccttcaccagtctgtcatttttttttttttttttgaggtggagtcctgctttgtcacccaggctggagtgcagtggcatgatcttggctcactgcagcctccacctcccatgttcaagtgattctcctgcctcagcctcccaagtagccaggattacaggtgcccgccaccatgccyggctaatttttgtatttttagtagagacggggttttgccacgttggccaggctgatctcgaactcctgacctcaggtgatctgcctgccttggcctcccaaagtgctgggattacaggcgtgagccaccgctcccagcctgtctccttatttctatcaatgatcccactgttctcttgagtgacatgagctcaagtcttaggccatccttgattctcccctgcttctcttcagtctgggccccatctagttcctcctctcagtgcctttcacagtcttctttccattctcattgccagggctcctggccagggccctgtgtccttggcctgactatcccagcagtctcttcattgagctctctgctccagccacctcacctcctatgcccacacacactgtttcctccatattctaccattcctcatttgccattgtatatatgctttcttattttgctatttgcctgattcctttgtattttgtctttcaagtttccaagactagtgaccatacatctctttttaacttcagcaatttataaagcagtgctttaacaaatatttcctgttgacaataaatatgatattagaatatttttagataaaatgatctttagaaaatagtgccaaaagatatgtaagttaaaataacaacaacaataayattgatatttgggccacttgacttctctaatgggcatctcrgaattacttcctccacaactgatctgtctggatcttcccaaaccccccagtctacttctcaatagttttccctcatgttagtaggtgacacctccmttcttccagttgttccccatccagaacatgtggaatcatccatactctatattcatcagcaaatcttttagttcttcctttgatatatccaacacttctcactcactgccttcatcactaccattctgaatgaagcagtcccacatgctttattcccattgctttccatcttccttaccctgctcttttctttttcatagcacacatctcatctgatttattatatttgtgtgtttattgtctgacttcctccaygagaatgtaacctctggaatggcagggactttgttttgttccttgcaaagtcccagctactagaacagtgattggcgtgtggcaggggctcaataaatatttatgaataaattgatgaatgaatgcatgaacccaggtctatccgattccataactcatattctaccctgctacccactgaccaggaacccgccctatttctccttgaacacatttttcagctactgtgttcaacaactaatttatatttaaataaatcggttttcttttcagaatcagcattcgagcwtttacacagctctttgatgaggacctgaaggaattcacaaagccactctattcagacacatttttttctttacccatcactactgaatcaggtaaggctaacctttacatcatgttctaccaactgccatgtcacctacaagagcctctaatggggagatattggctgatggtggggggaacatttattttcatttggaacttaatctttatgtgaccaaaaattgatgtggatcaaagggattgtacaacytctctagaagaatggattgaaagggggttaatctaaaaagaaggtggaagtacagtatttttttctattaaaaatgaattattttctaaatagtgagtgaaaaccattaaaatcaagagttttcacaggccaaaatataagttactacaaaacactttcagttaaaagtgagaatgtatatatgcatatacacagaaatgctcaggaaaaaaagactaaaagaaaaaaacaccaaagtattaatgatgtgtatctcaaagtaatggaaatacaggtgatttttcttccttttgcttattatgtgttgactttgtagtactaaaaaccattaatataaaagactgtgcataacaatttctgaaagagacttctctagtgtgttagagggaaagcctgagtaataatagtggctagtatttactgttcaccttctctatggagacatagttttaagcattttacatgggataacttgtccaattctcatgacagtcttttgagctagatgctattatcatccccatcttaaagatgaggacatgaggcaccaagagattaagtaatttgcccaagatggtgcagctgaaattctggcactttctgcccaagcgtacaacctctgcactgccctgtctctgaatacttccaccaggctgagaatagcatcatttcatcaccttccctcccaacaccatcgtctgcgtagccttttcctgtaatccgtgttctgcartgcttgatctctaggtctgggaagttctttacagctaaaactgtctctcgtgctgcatgacaaacgatgactcagcctcacaaacattccaatctatttatgccaaatatagggataatctcccaatttcaagctaaagggggatgagaacacagttaagaggatttagatgtctttacttataatttaatgtagggactttgtaaacacaattctttcctttttgaaatactgttacatgacaaaaattgcatgtagtccagtacaggaagacagtaaacgtatattcaaaaaaggatattaactacattcaaggaaagatgattgtgttgatttgatgagtcttgaaaagcaacatggaacaaacaaatctaagatcttaaaatgcaacttcaaaaatgggccacttcatagacctaaatttaagggataacacagtaacacttttacaagaaaacataggtgtaaatctttgtaaccttggattagaaaatagctttttagataggacaccaaaagcataagctacaaaagaaaaaatggatactctggatttaatcaaaattaaaaacttgtgcttcaaaggacactatcagcaaagtaaaaagacaacctacagaataggaagaaaatatttattttccaaatcacatatctgataagggctgaatagcatataaagaactcttacctcacaatttaataataaaaacacaaattacactatatatatagtgtaatatatatatttttttccttttttttttttcttttttttgagaaagtctcgctctgtcgcccaggctggagtgcagtggtgcgatctcggctcgctgcaagctccgcctcccaggttcacgcyattctcctgcctcagcctcctaagtagcagggactacaggcgcccgccaccacgcccggctaatttttttatatttttagtagagacagggtttcacgtgttggccaggatgttctcgatctcctgaccttgtgatccacctgtctcggcctcccaaagtgctgggattacaggcgtaagccaccacgccaggccatatatatatatatatttttttttttttcaagacggagtcttgctctgtcacccaggctgtagtgcggtgatgccaccttggctcaatgcaacctccacctcccaaattcaagcaattctcctgcctcagcctccccagtagctgggactacaggcatgcgccaccacacccggctaatttttgtatttttaktagagacaaggtttcaccatgttggccaggctggtctcgaactcctggcttcgtgatctgcctgcctcagcctcccaaaatgctgggattacaggtatgagccaccgtgcccagccaaattacacaatatttaaatgggcaaaggctctgaatagacatgtctccaaagaagatatacagttgactaataagcacatgaaaagatgctcaacatcatgaatcattagggaaatgcaaatcaaaatcacaagaagataccacttcacacccagtagcatggctataatcaaaaagacagtaacaagagttagtgaggatatgaagaaatcagaaccttccatacactgcttatgagaatgtaaaatggtgtcactgctttgaaaaacagtttatagaaatattaaacctagagttaccatacgacccagcaatttcactcctcagtatatacccaggagaaatgaaaacatatgtccacatagaaacttgtacatgaatgttcatagcagcattattcataatcgccaaaaagtagaagcaatttaaatgtccatcaatggataaacaaaatgtgatatatccatacaatggacgattattcaaccataaaaaggaatgaaatcttggtatatgctataacatggatgaaccttgaaaacattatgctaaatgaaaggagccagtcmcaaaagatcacagatttatgatttcatttctatgaaacatccagaataggcaaatccacagacacagaaagtagattagtggttgccagggatcgcggggagggaggagtgggactgactgctaataggtaygcggtttcttttgagggtgatgaaaatgttttaaaattgattgtggtgacatttgcaaaactttgactatactaaagaccactgaattgtacaacttagatgggtgagttgcatgctatatgaatgatatttcaataaagctattttaaaaatgaggccactcttacctcttcataaactcccagtagcgttaccataccagataataaaaataagacttcttaraatagctccaagcaatccactggattttccaaagccccagatgctgtgtaacatgttttatataaatgaaatggcatttttatcttggtggcaaacttatggcctttatctcaggtgccccaagctttatatacaagtgcaaagtccaaaattcctctataagctatgcaacattaacttcaaaagtatrcagtgacacctggcctcactgctacagggtgggagccagcctttcatcatcttcttaggtgcatactcagagcctttggaaagtaaatgcctcatcgtgggcatcacttgaattctatttgtaataacattacttgggagatatggcttcaatagctttctyactggttccctagcactaattttcccacctgcgtttgttgtttctrtctggattattgtagagcccttgtttggagctattgaaggtgtgagtgctggtctgtttttaattggcatgctagtggctgttgttgccttattgatctgcagacagaaagtgaggtaagtacaaagatccttttggtgattggacccacaactttaaaaatgcaactgaaaattccctttaggctgaaaactaagaagggaaaataatttaatttttccaggttaaattgtcactgttttctcaataaaaacaagtcaaactctaaagccatgactcacttttctcagctcttttatatcccattgatgaattcagcccttaccaaaggactgaggggccatctatagctttatttaaagatgaagtgactccttttgcacaggaaaaaaatattttgtgtgtgtgtgtggttcatatcctcatgaagacagagatgtttgcaaattgcatgcccaagtgcttttctgaaatatcctgaaaagtgtggttgacatcaccattttgtagttcatatctgccatcctaatttaagaagggaccaaaaagaaccaaatagcatgtggccccaagtgtcgtgccttcttctcttagtgaattttttttcttaatttggcacatgttcctctttattgaagtcgtgtctggcatctgaaatttactggatttttttaaagcaaagttttattgagaatgtgggaagtgattataacctgtagccaaaaaccaggagacaaatcttcagtttttgcagagatccgtttctgggtgggaatgatctactttattctctttcctttccctccctcagagatgttggctgagtgcaaatctrtatgaatactgaaaaatccatatttgcacaaacatccacagccttaccataaatggaaaaatttgttcaagccaagtatcataatcagaataaaagttatctcccttatgtttcagccatggtcgagaaagaccctctgcccgtctgagcattcgtagggatcgaccattatctgtccacttaaacctgggccagaaagggtaagcaccacatttgccttcgtataatttgytgaaagatggtattatgtgaaatttgctaacaaagtcttcctcttttggcttctcttcacagtaaccggaaaacttcttggtaagagagagaacacattaattactatattatctgcctttgaaatatgagtcagaatagttatggcactttcccttttctgcagtaactcttttctgtttgtttcatttttaattacagtccaataaaaataaatcagtttgaagggcatttcatgaagctacaggctgactccaactaccttctatccaaggaatacgaggtacaactcaggcagaatgaagcttcagcatccctagttcttagcagaatttccttcctaatgtttactgtgtcatcataggctgattgagctcagaagttaggaggctgcttagaatctcagctgagcactcttttatgcctaaactatgccctgaatagaatataccatctaatcttagaggccagcttgagctccagaataacacagcaaaccaagggctacctggatcagatagtaaggaagaattaacaaatctcaaatgcagacctaawgctgtcagatattcagcctggccatttgcttggctggaagatgccgtggtttcgcaaaaagcacgtagcttttggaactgattctcaggtttgccacttgggtgacctggggcacatcagttatcctgactgagcctcacctgtaaaatagtgagaccaccacctcccttgtggggctgttgtggggatcagggctaatgcatgttgagtactaggcattcataaacaatagctagtgtatatattttcatgttattatgttatctccaggactgtatgatttgctttattctatttcatattctccacttacaaactcatatttgacctaacaggagttaaaagacgtgggccgaaaccagtcatgtgacattgcactcttgccggagaatagagggaaaaatcgatacaacaatatattgccctgtaagttttgtgtcaaaatttgtaatactgtcttcctctagccatttctgcatttttctccaaaaatgaaatgaggctaaagaaatataatatagctcgatatggacaatctcaagctctgaatgcctttartaagaaatagcttgtatattcctgcacttccctccagagggataatagccagtttaaattctgattatgaaagtcctcttatgctgttgacatttccccatgtgatgctattgcttctctttggaggctaagcagtaaatggggttaacagcaagggctctgacatcaagcagacctgggtttgcttagcaaagtcttcggttagcaatttctacttaaatttccttaccccattaggtaaagcaatagaaggtaggttttctggattgtattcattccagcagtgaaagggagctggccactccatcaggcaaatgtggtaatgtyagaaagggaagcacagatggggcttcatgttgtctcctgtgtctgactggttataggccacctatgcaacatggggcaagttagttatcctgcctgagcctcatctgcaaaatggagataagatcacttcccatctgtggctgttgtggggatcagagctaaggcacatcacacacatcacataaactgtagaaaagtcactccaagactcagcagcaaatctctccttccagatgatgccacgcgagtgaagctctccaatgtagatgatgatccttgctctgactacatcaatgccagctacatccctgtaagtgacccactaggccrtagtgttcaggatgaggctttggtgggtggctacactggagatgccactcctccatgttcctgttattcttaggtctggaaacacctgtagatttcagaaragcacatctgaatgccataaaaaaaatggggtatccaattcagttcctgctacgccacatttttcacaatggctatagtcaaatgaaattatgagcccaagatgcattttcatagatcatctactctctgcagtccttaaccaagatgagagcttcctaaggaagatggacckcccctgctaaagctgcctagctagagaagctgatcccatgttatttggaatcttcacaaccacagacacaactcaaaggttatatcaaatctttgggctctggttttggttagcatcttgccaccttcctatggcatactgcagtggaaaaagctttcgggtcaaacaaatctaggtttgaatcccacttctgccccttgttgattctgtgaccttgggcacattatgtcacctttttgggcctccattttcttttccaaaaactgatgataataatatttacctcatacctcaagcaaccatccattcactcaataaacacttagaaattaagtgctaactgagctgtttacaggcatgggataagatggaatcctgaccctaaaggaactctcagaagagttgaggcaagaaaaggcaatggcatgggaaacctgccacagcagtgcctctcctacattgaaagatgtctgcgccatctgaggatcttgtgaaaaggcagattctgatccatcagggctgaggcagggcctgggaatctgtatttctttctttttttttttttttttttgagatggtcttgctctgtctgccaggctgtagtgcagtggcgcgatctctgctcactgcaagctccgcctcccgggttcacgccawtctcctgcctcagccgcccgagtagctgagactacaggcasctgccaccacgcctggctaatatttttttgtatttttagtagagacggggtttcaccgtgttagccaggaagatctccatctcctgacctcatgatccgcccgccttggcctcccaaagtgctgggattacaggggtgagccactgcgcccggccgagtctgcatttctgacaagcctcttggtgatttcagtgctgctggtctgagaacggcactcagtagcgagaggctagagattgccatggggcatcttggagaatatcccccagcagasagaaagataaaagaaggctcagccaagcaggcaccatgctgaggataagtaaggattggtcagatgagaagcagtgtttgggtgggcgggggtggcgatggcagaggtgacataatgtggagaccctgaggaaaggcaaagagaaagagcttcgaytagaattgacaaggaattgctgtcattgccggagtgcagaaggagtagatgaaaatatcccgctcttggactgtggtttggattaaataagtcctgacctgcgacacattagatggtagacgctcagtcaacagtttctcttccgtgatgcttcctgtggatgatatatcttaccaaattattctgacattgattatccaaaatgactaacactcttctacattaaatagggaaagagcctgattacagtccctccaacagtctacacaaataccccccaacacacacatataattgagggtgaagtgttttctagatcattgcctaagtcccccatttgctttcagaatagacccaggcaagtaaaagggaatgtggctcttaacactagttcaatgttctgacctttgtccttcctgctcccaagcattgacacttgtgttagtmtctttttctgaagtcagagacttggcagagacctccctatcatctaatctgaagaactctttgtttatagttctgaagaggcccattgtttctgactctccatattgtaaattcattgcagggcaacaacttcagaagagaatacattgtcactcagggaccgcttcctggcaccaaggatgacttctggaaaatggtgtgggaacaaaacgttcacaacatcgtcatggtgacccagtgtgttgagaagggccgagtragtaaacagccttcctggcatcaaagctttgctttctgccacctggatagaattctgccccatcatcaaagtgaaaccccgcaaaacaacgtagggatcatgtgagagcattgttagtgacttataccactctgttcaaaagactctaatagtaaacccaagtgatgcctgattctgattctgggtctgaagttccagtcaaagctgtttccatttgaggactgggattagtggcagtgcccattacaccaaaaattacctggccacttggctactccattcttcagtgtctggctggaggagagaccctgccagagtcactggacctgcccctcatcccaggaaaggagaagtgagttgtagactgtgttggcagacacaaagtaaaataataatccagacaaatcaaccaaacccccttgtaatgcacttaccatcctctactttatatggttattttgaggattaaaagattgaggattaaaagagagattacgtataaagtgcctagtatctgcgctcagtaaacatatgcttacattcctcttccccttgtctgtatacatgtaaaggcgagcttagctaaacgttctaacttctcaaagatctcttggcacacggcccacgttaggacagtgacataaaaatatgaacgaagaagggccaggaagacagtgccttcctctacycaactagatatttctttytttagaaagaacaatacgttgtgaaccacagtttacctgctagtggaactgaaatgctgaggggaaaaaaamaaaaaaaaamaaaaaaactcaagccatatattactgggcctaaaaaatgagtgaacccaaaggttggagtcaggggtgctccttgtacaggctctccccttcacttggagcagcacctcagcttcagcactggccatgagaaggttaatataaagtagatggtcaaattgctttagcagctgatcccagattcctaactttggaagacatttagaggagggaaaccccaggttcaccaaggagtcacttttccggactcatgttttttctgtctgtyctgttctaggtaaagtgtgaycattactggccagcggaccaggattccctctactatggggacctcatcctgcagatgctctcagagtccgtcctgcctgagtggaccatccgggagtttaagatatgyggtgtatgtwagcttgcttgacttaacaaccgagcttggggagatgaatgagatctgtgaaccccactttcgctggttcctctcttgtagtttcagcccataggagttgctccatggctcagctgtcaagtttgaaggtttgcattggacagttcctcttttatcctgctctctgctcttacaggaggaacagcttgatgcacacagactcatccgccactttcactatacggtgtggccagaccatggagtcccagaaaccacccagtctctgatccagtttgtgagaactgtcagggactacatcaacagaagcccgggtgctgggcccactgtggtgcactgcaggtactaggaaacctagcagccaataaaatggcagccataagggggttgtgcctgggagtctggaaaaatacataagcatggggaatttggtgggtggaggatttgtctggaccaaccagcctgcctcgcccccagagggttttataacgttcctccccttctgccaacatcatttctcttccctgacttcttttccactttcttcccctgtagcctctctctcatcctcactctccagccttctctctccctcttgcttttttcctactttctgaaatgcaaagtcctgatgggaattccatgctttccatcatcaggcatatcaccttcaatctaagttcccaataactcccttcacattctagccaggaaagtgagcacacaagcttattcttgcctctggccattcttccattttggaatggctttatctctcttctccacctaagtcctacctatccttcaagatttattttctaatcttccctccaggtctagtagcatgtctttgtctatttgtgctgctaaaacaaaataccacagactggataataaataatagaaatttatctgtcatagtctagaggctggaagtccaaaatcaaggcactggcagcttcagtgtctgttgagagcttagtctctgcttccaagatggtgccttgttactgtgtcctccagagcagacaaaggctgtgtcctcacatagagggagggatggaagggcaaaagaacctagctagttccctccaactgtttcacaaggcaccagtcccgttcatgagggcagagccctcatgacctaatcacctcctccacctcttaatactgttgcattgaagattaagtttcaacatgaatttttggagrggacacaaacattcaaaccacagcacagcaattgccacctgtagcacctaattttttctcttaaatttgttctcttgatttctctttgcttcagtctgtccagaaaatcaacctaacaagtgaaatctctctctctctggcgagcctggtatctagcaaattaatgtttgcagcaacattttgatagccctaactgaatggcactaataaatatggagcagggaactgcagcagtaagagaaatgccaagtgtactcatctcctccctgtcagcccagcaccctaggagccctgctttcctatgtccttggaaccttgacacttttaataggaaggtgaggcactcacctcagagctttctgctttttgaaaaatggcaggcatttttgtccaggaccactggagaactgttatcttataaatgtgtgtatcaaaaatccccagatgacacaaccattttggggaggaatttggcaatccctagtgcagctgaaggtgttcatgcccatgaccaacccaagagttctgcttctaggtgttgacccctgagaaatctccacatatattcatgttctttgcaacacatgttttaatagagaaaaatttaaaatgatctcactgccactggattagcagtggtttatgaagagaattaattaaaagaaattagatcagctgggtgtggtatatcctgcctctaatcccagcactttggaggccaaagtggaaggatcacttgaggccaggagttcaagaccaagctgggcaactattagggagaccttatctctacaagtctttttttttaattagctgggagtagttacacatgcctgtggtcccagctactcaggaggctgaggtgagaggactgcttgaacctgggaggtcgaggctgcagtgagctatgcttgtgccactgcactccagcctgggcaacagagcaagaccctgtgaaggacggaaagagggagggaggaaggaaggagagagaaagaaagaaggaaggaaagaagaaasgagaagatctatatgtagcaatatagataaatctgaaaacataatattgagtaggaaagttgacaaaaagatacctaaagcacatatgttaccatttcagtagatttttcaaacataaatgtttatagatttacctgtatgtaggaaaagtattaaaaacatgcgtggaaatgatacacagtaagtgcagagcagtacttatccctggtagagtggaggagggacaggaagggagtggaaagagatagaaggctgtgggggggtggggttgggggactctaggttaaacttatttgagagaaagaaatattcctatcttctcccataactgggaagggaaaaaaaagattgtgccagagtctctagatgcaatcttgaaaggcaaatttaataaaaaggctcaatcttcctttgccatctcttctagtgctggtgtgggtaggactggaacctttattgcattggaccgaatcctccagcagttagactccaaagactctgtggacatttatggagcagtgcacgacctaagacttcacagggttcacatggtccagactgaggtaagagttatagactgaaagttacaggccaccctcctccccactgtattcccacaaaaaaatatccaggaccttaatctgacaaggggaaataactatgacacattaggaagagaaaaaaagaactgcatgtagatattttctaagacttgttattttaaaacaaatctcactggtcttgaaggtgaccatcttggggatcattttaagataggctggcagatgagcataagaacttcacttaggaaagaagaagatcccaatctcttctctcccccagccccactccctccacctacacccccatttcaggagaccccaagggagtgtatgtagatggtaaagaccacgtgcttccatttgtgcagcactttgacatttgcagggcatttttgaacatgttatctcattaaattttcacaataaccaagcgagacatattatattctacttccagactagaaaatgaaggtccaaaagcttaagggctttgcacaaagcccacagccatgaagtggctgaggtggcttggccactattctagagaaacctgggcccttgattgtgctataagcgtactagcctcagggtcagatctcttcctcaatagagaccaagcattcactcctctgcatcaatgccttctaaggctcaaattctcttaccctcgtgtttcacaartttttctccaagtaactaagcaaaatcctctgtattaaaaaaaaaaaatccatggttggaaaagtaaaaagttctacatgcttctgtgtcccctcttagagccacagtacccaaggacaatgcacagacagcaatgctccataaaaagagagcttcctgcagccaaggccccctttgagctttattgaacccactaatcccaaaaccaccttgacccctgaattcttttcttgtgcagcacatattaatatmctgcattcaagccagtaacarttgaaccagagaaatgaaaataaaaattaaaaatattctgcagaactcacatttgacaaaacaatggcatcattgcctcctkcaggcaggaacctctgccaccactattgtcctgggctgggagtactttcattataacaatgattctaccatattttgaatgttttattatgaaattgttttgaaaaaatatacaaaacatggctgggtacagtggctcatgcctgtaatcctggtgctttgggaggcctggagaggggcagatcacttgaggccaggagtttgacaccagcctaggccacatagcaagagcccatctccacaaaaaatttttaaaaagaaaatacacraaactaggaaaaatagtatagtgagtttccatgtacccaaacccctgcttctacaattatcagtattctgtgttcttttcccatctgtatcccacatttaatgttcccctaccccatgaccttatcccactgaaatattttaaagcaaatcccacttatcatattatctcatccttaaatacacatatacwtatatacacatatgtatgtgtacacgtgtgtatgtatatatgtatgtgtgtaatacatgtcatattgcatatatgtgtacatgtgtatatgtgcatgtgtatatgtatacacctatatgtgtacatttgtatgcatatgtgatattacatatattgcatatatacatatgtacgggtatataagtgtgtacatgtgaacatgyatacatatatatgtatatttgagatactctttaaaactatgaccacaatgtcattatcacatctatgtctttcttaaccgttattcctaaatctcacctaatatccagtcagtatttaaatatccctaattatctcaaaaaattactttttataaaaaactatatttggttttcattagaatccagagtttacatatttcatttggttgaagtgtctctgaaatctttctataatctataatcctccctcccatttgttttccatgatatttatttgttaaagaagccagctgatttcttcggcagattttcccacattctagatgtggctgattgctttttcatggtggtaatatattcctctactccccatggatttttcctctactccccatggattttgtcagctggtggttagatctagaggcctgattaaactcaatgcttcatgggtggtgctgagggctttctgttgcatgacatcagaaggcagatcaccatgtctgtctctctttcagcgctgaggaaactgacagtgagttcaggcagtgtcagcctgaacccttcattatccccatcaacccttcacttaatggttttagcagccactgatgacctctgyctagcgctgttatttcatcaaaggttgcagaattatataaccctgtatcataattattaattattatccttcttattaattattatccttcagctttctccacaagactatgcattcctagagggtgggagcctgttttcctcctcttctatatcctcaatattttttaatcttttaaatgaatgaacaaatatcctacaattatgttgctaaaaagtcagcattaatattttgttagtttattgtcactttcacaaactcaaaccctaattaatttgtaacttgggaaagaggaggttatcrtattgtaaatagtctcaaactgtgtgtatttgtgtgctctagtaattgtcaaaggattcttgggccatgtatcacctccatacacctgccccaaactcataatgcattttggcaactaggagggactctactgtcaatatcactggctgactttcagagcagaggtaacacaatgttcctcttcctccttctccttagaaataactccatcttttccctgttctgttctccttttcctcctgcctcactgaggayactgtggcatagttcctcagcttgccttcttaatgtttgagttccccaaggttttgtcctcaaggcaccaccctttctctcagtcttcattctttgtgatattctccattcctgtacatgctcatgttacccaaatctaatctcctgcctccgcatacatgtaaatgccygcctaccagatggatccccccaaaagccttatagccatctaacttcaaaaagaycaaagtcaaactcattctctttctttcaaaacasaaaacaacaacaaaaaccttcctcctgcttttgcaccttccagtttcatttaatagtattgccatccatgtgtttgcccaagccagggagctgacttcttatattttttaagggatgcagtctcaytatgttgcccagactggactcaaactctgtgctcaagcaatcttctacagatgtgcaccaccacacctggcatgcttacatgcatggatatgtgcatttatttattatttctattttttgtttgtttatttacgtggggagataagatctcactatgttsaccaggctagactcaaactcctgggctcaatggagtggatttcttttcctccagttcccacatccaagcagtcacgaagtcctttccttcccttggagctagcccctcatcccactgccactgcccttkatcaactctcattagccctgctaatgagtagcctcctaatgggtctcctgcctccagctctgccctaatgatccttcgccaccactgccaccatcaaagttcccttgctgactctgccagctccctgcaaaaaaatcgtgaaaagctcaccactgcttgtaaaatgaagttcaaacctcatcctgggtacaagcttctttataacctggcccctacttactcctccagcttcatgtcatcgtactagccaccaccagtgtttagggtctgccagattaaggaaggtttacccacctgggccagaatccactttcagtctttccatcataatgaaataaacattgcagtaagataaaattttctctctcccttttttctcaaacaaaattccaaatgctatccaggtattaggttggtgcaaaagtagtcacggtttttgccattacttttaatggcattaattgcattttaatggcatttaaatgcattacttttaatggcaaaaaccgtgattacttttgcatcaacctagtatcatctgccttgctttaagcctctgctgaagttgagttgtttctacaggctcagaaaccctggtgctagagctggcatttggtaatgggagtgggtgcagaggggtgtgatctgtggctgagcccctgtgggtgactatttcagcaaaagacagaggacatttggaccccttgtattatttttctgggtccatggtgacagtgaacttcaacttacctctgtctttatttgagatacaaagggatgcaggtcttcacaagtttccaaacagcaagcatttctaaacaaagaggcattggtcaggggatttgtgagtgtcccttcttcttttatgctgctttgagggaaatttgcagcctgaccctgagagacacattaagggagcaataacctgttaaagaacaatagatgatagtcacagtctcaatctcatttgcttctcctgggaaggaaacactgagatgttgtaggactaaggacctcaggttgcatttggggcattgttcgaggggtttcccatgacccatgcaaccagcattttagctgcactagacttctcatggtttccagaatatatgtgaaattgtatgttatgttgccttacttctttgcttgaattcttataaatatcaccttttctctttagcttgatagtttcctyccctcaaagtgagcctaatggctttctctcctgtatgaaaccttatacacaattgtatctgatgtttagcatcttataggtatttgttcactaaatactaagccatgcactcagggatcacaaagagactgtaatacyataaataatatctaatactccaaatattgatgaaattgaatggaactgaatgtgtgaacactaagccaagccttcaccagttaacaaaaaattatcttttgtgatctgagattcatatattttgtctacyytycattawsaataaagtgagaagcacattaacaatctcaccgttttagtagtaatcattttcaaagggacgttctattgggaaaggaagaatttgtatttaaggcaaggcaaattaatagatattaacttgtttcaaagcccayggtgaatcattgttaaagaatttattaataggccatagcacagatgcactagagttcattcacagcttacctctaaagtcccaaagtaatgtaatatcccagtagaactgaaaagatgaattatgctttgggtgggaggaaacagggaggtgtcagcctataatttggtggatcctttttaaggtagcaaaaagagactgctttayactaacaaccattctcagattgtacctttctcagattttcaagattgagattgcatgtaacattcataataaatgacaaaggtctgtgagcagaaaagcagagaatagttatcaatattattgcaggcctcacttcttattgatttgtttaaaatgtccttttctaggctgggtacagtggcacacacctgtaatcctagcagtgtgggaggccaaggcaggaggatggcttgaggccaggagtttcagaccagcctgggcaacagagcaagatcctgtcgctaaaaaaatttttttttaatttatccaggcctgatggtccatacctataatcccaactactcaggagactgaggtgtgagaatcacttaagaccaggagttcaaagctgcagtgagctatgattgtgtcactgtactccagcttaggcgacagaacaagaccctgtttcttaaaaaataaataaattaattaaattaaatgttcttatctattgattataccagacctaccttatatagtcccatggatagctggccaagctaggttccaatcagggacagtatctagtgccaacccataaaaataagtacctgtttacttggaaagattgttagtgaggaaagagctaattgttctactttgtatctcaaacctctaaaatacttttaagactgactacactgattgccttaaacacaaggtctggaaatatttttcaatatctatctgtctgacatcaatctatatcctttaatagacaaaggatgttagctataaaagagacctttgcctccttgtttaataagtggggaaactgggatccccagaagcctgatggctcagcctggcctggctggaggctgctgagagcccagtctccttcactgctcacaactccctctgagcagttgctcagcaagggaagttatcagcaagggaaggttccgcagaaatcaatttccttataagagaactcasggagtataaggaagggggcccaatgcacaagcttggctgcctgtggctgagacacagtggcagtggaggtctttatggtcaccaaagcactgactcttctatatctatttatatttcaaaagtagtaaattcttaaatagccaacagatgggtctgtcctcgctatgtaacccttgtagttctctgcagttagccaacatctttgagattcttccacgtggcagacccagatgctgagagaacagaggtggataagacactgaccttgcactcaaagaactaacagtccagcggggcttattgtacacacctcctttttttcactatcttcctagaataaagggaacaaaccagcagagtatgcagtgaaatgattttctcattcagtaatgcaatgaaattgggattcatctaagaaaactggtgtagtgaaaaagacatgaactttgaggtcacatctccaagatcaaaccctagggccccatttcttagctgtgtgaccttggagaagttacttttgagtctcactttgtactgataattgtatttacttcacaaggtttttgaaatcattaaatgaggtaatttacgtaagctacataggagtgtccggcatttgttcatctactcaatttgtaaaggacctactacgtactagacacagttgtaggctctcacagaatattttatatatatatatayacacacacacacacacatatatacacatacatatatacacatatatatacatacatatacacacatatatacatacatatatacacatatatacacatatatacatatatacacacatatatacacacatatacacacatatatacacacatatatgcacacacacatatatatataaaaagaatgaaaaatgccacctctctgcccattaccattgttctcttttcagtggtaataaaagacagtcactcttttatttaccagagaccattagtgaagcgatgttcaagaaatttgctaactatataatcccatcattgtcaacagtttgtgagtttctcatctttcttatgcatgagaacaggccctcctctgacatgtttctgcttttccacagtgtcagtatgtctacctacatcagtgtgtaagagatgtcctcagagcaagaaagctacggagtgaacaagaaaaccccttgtttccaatctatgaaaatgtgaatccagagtatcacagaggtgggcacttacttcacttacttccccaagtttcttcatcaagatatggtcaatctggccaggcayagaggcttacacctgtaatcccagcactttgggaggctgaggcmggaggatcacttgagcctaagagtttgaaaccagcctgggcaacatagggagatcctatctctacaaaaaactaaaaaaaaaaaaaatagccagacatcatggtgcatgcccgtagtcccaattacttgggaggctgagggggaggatcacttgggcttgggaggtcaaggctacagtgagctgagatcgtaccactgcactccagcctgggtgacaaagcaagatcctgcctctaagaaaaaagaaagaaagaaaagattctagctgagtgcagtggctcatgcctgtaataccagcactttgggaggccaaggcgggcagatcacctcgagaccagcctggccaacatgatgaaaccccatctctactaaaagtacaaaagagccaggcatggtggctcacgcctgtaatcccagctactcgggaggctgaggcagaactgcttgaacctgggaggtagaagttgcagtgggccgagatcccaccactgcactccagactgggcaacaagagcgagactctgtctcaaaaaaaagaaaagaaaagaagaggagaggggaggggagaagaaaagagaaaaaagaaaaagattmtggaaaccattaataacctaaagctcttccaatgtacaccacccrtttcttctcctacccataaagagtggcaacggggaagagagggagggtagggagggggttcctgcagctgagcagcagtttcacaaggtatctcttccagcctagctgaggatgcctgctatgaaggactctgcttaacctttcttttccaagcaataagctttactacttggggaggattctttgaaatcacaactagttcaaattgtaaaatccctttggaaaataatttgtcaatcaaggtatcagggtccttcatatgttcttatcttgtgaccctgtatttctcctaccacactatatacaaaacaaaamaaaaattatgcatgaagctttttgtagctaaaagtttgacaagcctgggcagcaaagtgagaccccttctctacaataaatttaaaaattaaccaggcatggtgtgcacctgtagtcccagctacttgggaggctgaggcaggagaatcacttgagcccaggagttgaagsctacagtgagctgtaattgtgccactgcactccacctgggtgatagagcaagattgtatctcaaaaaacaaacaggktgggcatagtggctcaagactgtaatcccagcactttgggaggccaaggtgggtgatcagctgaggtcaggagctcaagaccagcctggccaacatgacgaaaccccatctctactaaaaatacaaaaattagccrggcatggtgacgtgtgcctgtagttccagctacttgggaggctgaggcaggagaactgcttgaacccgagaggcgaaggttgcagtgagccaagatcatgccactgcactccagcatgggccacaaagcaagagtccatctcaaaaaaaaaaaaaaaaaaagaaaaaacaaacaaaagaatgctatttttgaggatgttataatagctaaataaagaaaagcaggatgtaaaacaaaaacaacgcataaggaaaaagactggagaaaatataaatttccctgaacattagaaaaattattatttttccttctatttttttgtattttataaatgttctagaataagcacrtaacacttttcaagtgggaaattcaatagaaaaaaaacacaaaccttacaaggcacagttctggtcaagcaataattaaatgactagaagggtcctcctgcgtcgtcttactctgggccatcgtgaagacctaagttatcacataggcaaactgcaaatgtgaaggaggattgtattagttatctattactgcctaacaaattaccccaacatttagcagtttaaatcagcatttattgtctcactggtggctctggcccagagtctttcaggaggttgcagtcaagacttagrctggggctgccattatctgaaggtttgactggggctggaggactcgcttcataatggcttgttcacatggctgtgggcagatgcagccacaattccttgccatgtggactggtatctctctataaatcagataatctttctttgacaaacattatttcataccctcttatctccattctaaatgatcttcaacaggtagtgtctcctaaccttttacttagttctctctaccacccagcctagccagtatgttaatgagttagcatctgtaaagcacaaataaagagctactatttagaggagtcctttgtaaatcagataattattttgtattatgaataattacaaattacaccctaattkatctgtatagtaaattraggtttttgcatgggagattccttaagaggcttcagtatgagcaagttctgagggatcttggaggttcctttgtcttgttttgacttaagaatctttttttagagtaatcttgagcactcctgaaagaagctaactatggtatagaaaaggataaccaccacgtagctgaaggctaagattcaggtccgaactctcgaactaactagctgtaacaagctgtgtaaccctgagtaagttactctgcctctctgggcctatggcttcatccataaaaacagaggcgatgggctagaatcactagtcccttccaagtctaataatctgtctttctaaatggaattacctggtcccaataggaatggtctcatcttaaactaggttgagctatatgtttctgctggtctttcacattggtaattttcataaacagcgyaaacaattatgacmcaccctgcggcagtctctaattacagtgttyttcctttcagatccagtctattcaaggcattgagaatgyacctgaagagctcctggataaaaattattcactgtgtgatttgtttttaaaaacttgcttcatgccctacagaggtgccagctatttctgttgatactatgtataatttattaatctggagaatgtttaaaattttatataatttaaaggtaacagatattattgtacatagttgtattttgtagtttcttctgtaaatatgtatttttcataatgtttaatattaagctttatataatactatttttccacactaaagtgttcatgacttgttctacataaaactaattcaacctgtatgacaggactactggtaaaatgcatatggaggtggtggcagagacaatccttcaggccatgttttctacctgttttgatattcactggacaggaaaaagggcagggctagagagagcaaatactatggctagatttgctgcattgctgtcccatgaatctcgagagccaacagacatgtcctaacttgctattaggacaaatgtgacagtcaaaaaaaggattagagggagggagaaaaaagaattaagcagtaccaaagctgaactagatgcttgtgtctgaactagttgctctctctctcctttctccttccagggattcaagccaaagtggtcagctcagggatcatgtaacttgcagtgcaagcccaggatggtaggatgcagggttgagggttctgatagagaatgattccaaacagaagtgatgaattccttttgttaataagatgccagctatacccagactggaaacataacatgcaaagcactatctacagtgattagagatcctttcattgcattcatggtgtggagtgtgaacatccacacccatactgtaatgtatttatacacactagtttctgtctcattttcagtggtctccattcctagaaaagtcacaattatccattcctacttgatttcccattaaaagaatattatggtagcagattgtgcccctcattaaaaggcttaatgccaacattttcatagaaatgactacaaacatcatatatagtaaatttaaaaacaatagcaaaaacaaaaacagtggtcttcagtaaaattttcaaaacttcttttagtaaatcaatgaagtcaaaatgtcaagtaatcacccaaagttgcatttaataacaaaaggcactacatactgtaccaagtttatcttcaatatttgtgccttacttahtttgactataacaaattccaatgagtcagaaagtatttccttcatcaaggtccagttccgacagcattcctgggaaaaatttgaaaggagtttgtacggaatcttcatagatacctgagaagatgagctggagatgtttgcctttttcacactacaaatttttctgtaataaacttgggaattagaggtcaagtttgttgatggcatagcttcctttgcataaagagtayatttcttttcaaagtatatatttttgtaacctaccataaagtccgtaagtgaatacaacgaatgtaattgacataataattgaaaatcattgactatacctaaaatagttctttataattaaataactctacacccaatctggaaatttttccaaggttatttgaagtttacaaaaatgtgaagcataatcataagcttcaaagattcacagtttcattgtgctcaatgctcttgtgaaatgacagtcttaagctctgattctgtatcaaggaactaagtgaatcttctggaaatgaaaaggaacaacatatgtgtaagtgcagtagatgtaccaccagcgagaaaatagaggtcagagatctacaacgtgtggcatccattagaaatcacctttcctacattgaaaagaaaaaagagaaaaagcagaattttacactaatgttgcttgatgcaaagcacattaatgcttggaaggatacattcattttcgacttttcattcactcagaaaacttctagtaagtatctgcaacctgctaggcactgttccagaatctacacatttctactcacataaagagaatcctcataaagttaggattgttgttactaccttcaattgagcttaaaagacagcctcatcaagggaatgggataactgagccagtctaggacagtggtcaccttccacaggccacacactggaaagtgctaatgctactttaatagcaaacctctggatctaggagagagagcaattaattgcacaaaccaggagttaaaaccataaaaaaaacctatgcatctgtaatagtaaataacactcacgtactctggcaacatctagggtagtatcagaattatgtaaatggacatgacagggaaaaatcgtaggtttttttagtctaatccaacccaggaaatgtttattcctaccctacacctaattttaaaccttcttagcaacaaatatttcactattcgctcctactcctgggaagactaaatatataattgacttatttattaaatttaggagaaaaaaaaagttttccttgacattcagctctattggatttatttccatttaattgcatcatgtgttatgtcttggtaaacactccatttcctgtcttggtgggcatcctgtctgtgtacctgtgcagtacactttaatcatcaagacttcaaagtgcttttgagctatcaaatcttgggagagtcccatctagcatcttaataattatttttccaagttcgttataattaactcctttaacctcatctcattaaatcaattttgtattrtcattctgttgttctctggaaagcagccaattgttcagctcttgaatcagaattttcaaagactcacctctcttacctgggcttgcacatatttgtcctaagtaattctctatcccttaaacctctgagtccctctgttttattacttgccccactcctcctacttgaatatgtttgttttcccagttgaatgtgatttttatctactgttcatattatcttttatacccatgagtataatttcatagtcctttcaggttccacatcatcaaagagatgaccataatttcacttttttttgaaatgaagtcttgctctgttgcccaggctggagtgcagtggcacaatctcagctcactacaacctccgcctcccaggttcaagcgattctgccttagcctcccaagtagctggaattacaggtgcctgccaccatgtctggctaatttttgtgtttttagtagagatggggtttcaccatgttggccaggctggtcttgaactcgtgaccttaggtgatccacccacctcaacctcccaaagtgctaggattacaagagtgagccaccgcacctggccaattcacttttaaatactaaaaggcacacagcacacagacattttcggggcagttttctttgggagggtctttgataaattttgtaatcacctctcggaagaaagcccaaaatgacatgtgaaaataatattaaaccatttaccagatgtccagcaatataaaaatagacctcacatgctacccttcacatgctgattctcttgccttgctgtttaaggatccagtttcttatgttaaacattttccttaccttttgcaataatattattggccatatactaaattctcattcacttagctttctaagaattctttgaggttggaatcctgaaatcataaagctaccagatctgcacaacagcagtggtagtatctgagcccaaactctgagacgctctagagttttagtttacaaacatgagccagaccaaacctgacctggtgaaaatcaataggtaataaactgcttgtatatgatagcagttcaagggctttctgggttccatttcactgaggaaatgaaaatataactgattagccaagacagagtggcaataaggaataactgatcctcctccaagttgcagtgagcaagccctcaagcctacctcattcctgaagagttgaaggagaaaatgccgtgctaattttctgccctgctatttttaacctgaaatttagaattacatcaggtattcaaagaatgttccctatcaaaggaaaatctgtaaacgatgactgcaaaaagcaagtgaaatgatgcaaagagaaaatatttgcaaaacagaatctaaccagacatcatcatgaagataaaatggcatctcttctgtgtggcctgggtgtgcttggacaatcctgtcacacgtttctattaggacatgttgcccttttgaggattcactctatgttggccagatggtttaactgattaaacaattgaatcaatttattttgctttttgaattgaccagatatttaactaaatgtactgggtttggcattttagacacactgccttagattcttgtagtgcatgatgactttgaaaatgtttggccattttagttaaaatgcagggtaacatttgatgcagccatgataacaggaaaaatctgttctgttctaaaaatgtttctagcaatagaagtatttctggctaagagaatactcttgacttgtagggaggctccctcggaataaatgtatgcaacacaaataaggcattttattttttaaaagattgtctatataagatacacttattaaataaagaaattgttggtgaatgctctgaaaatagaggcttatgtaatggaaataagagattaacaggtttaccaaagattatttttataacctctatgccaattcacatgatcttatataagacaccaaaataagttattcaaaactgtgaataatgtcagacaaatgcaatgtgtcccttctagaacagtcacaaaaagaattggttatagctattttaataaataatatcctcaccccaagaacaaacgttcagttatgctgagatgttctaatagctgtgtgcgtagataagcacctccatcaagaaaggaacacatgaaattgtggctttaagagtttgtggcagagttggacagcattccatctgcaggttagtaggaaagcctgtaccagcctttgtggaatgtcctagtctgccacactgacaagagggtgcaccagtgctctactggaagagtatttctggttttctatgcaggactattgggcttataaattcctcaagaacaaggaccaagtctttaatctcgtctcgactcctaccttgtggaaattagtgcacagctcatagacattctacacacacttcttgaaattgctcctggcctgatattttggatgttaggtagtcagtgtccaataatactgttgtccgtgcaggttaatctagccattccttcatttgtgtgaagcataaataatgtaagtaaatacagcaactgaactttttatgttctataatagagcacttttatgtttttaatatcatttattatttctctgaaaatccagttaagatggcagatgattctattttttcatattatagcatctacccacaatatttctaactaactgtatttgaacaaagaacttccttagtctttcaatttaaattatgtatttgcttaatacatttttatatttgtaactgtggtaaaaaaaaaaatctatatagcatcttgcatacattctcactagtacaggaataaaactgcagtttgttgaaggagagtgctctgtcttctattcacctgctcctcatttatcaatttttgtcatctgtctgttcaggagaaaggccaaaagtgactgctttaaaatgagaaaaatcttccaggacattatcatgaagaatatagttgtcttaacctttagtcctgtaagtactgagttggttacctacagtattgtgtacataataatagactctccagctgaccgtctccaactaaattcctgttttcagttctttacttcattaataaccaaaatgtcatctgttaccaacagtgttggtgtaytctcagaggtactgccctggctagatttccactgagcccttcagagacacttcacacatttgcggacagtgtggcatttggtaaagagacgccatgactatttccagagttatgagtttgcccttttgcctttttcatattttagtggaaagatcactgtccttcacaactccaatatttcatttttctataacttgttcacagaaacctttatttttttaaaaaatgtacagtagcagatttacaaataaaatcattaaatcaaagtaatccttccttttaaaacagtttctggactcaaagaagtaggttaacaaaataaattcatctatgaagctagattttttttccaaagtagctatttgacagaatttattcttaaagaaaaagagggtattgcaatttgaactaatcacttggtaattttgctgataaatcttccataatcataaaatattagagctggaagggccaacttgggaccaagaatgtaggaaaccaagacacaagtttaaaagcaatacagcaaataaaataaaatataaaaataaaaataatacagcaaaataagacaatgctgaaatcaaacctggttttcctgttactcagggggaggacctgttcatatgtaaatacagacaaataaaaatgctgctcattgccagcacagtggctcacacttgtaatcccagtgctttgggaggctgaagcatgaggatcactcgaggccaggagtttaagaaaggtgctcagaagccaatgtacacaatagctacttccaacactaaggcagaactgtcagtggaaccttcaatgttttgcatggttaatcctctttttttggtatctcatatgtctggaaacacccatgtattaaacaaatctcaggctgtatttaagagtcatacctgaacaaaagtcatcacagtctgaaatctgaaataatattacatataaaaggaaaaggcaggatttttctaacacaatattattataaaacattattgaaactaattgtatcaaaccttctagaatccagaagtttctacagctagattttcagagacctggcaagacttttgatgctgctgatgaaaggagcattcataatagaagagtaaaaattaactggtagaatccaagcctgaatagtaagagaaaaccacgcagggatggttctgtatagaagttaaccaacatttacctcctcccaaaggaggtaacaaaccccaaaggccgtgctcactaaaatatctcccgatccagtattttccaaggaaaattttactattataatagagaactgctgatatgaatgaagcttgctttttttctaggatttgttgtgacaataacttctcctttgaccaaaactttagttaggttcctcagtgtcctctgcctgactaggcccatccttgggcttccctctctgtccttgtagactccagtttaaagtcaggttagtgaaaatcccccaaccgaggtacctgaccacccttgatatcttatcaccctggcctgccttcagcaggaattccctttacccctgatgtttcctcctcttagtgagttttcattcactgacctcccatcctgctcctgctttaaataggaaagcttaattttcctttttaatttaatccccacttgtccttgctgaagttgaagar

SEQ ID NO: 95251 - DNA, 133281 bp, Homo sapiens
  misc_feature (1)...(133281): n = A,T,C or G
agacaggttaagtgccaattgagtggtacacacaggccaagaaggaggcgtgcatgaccgtgtggtagttcacaggcctttggaagtgcctgtgggctgagctcctcaggcattttgtttccagagatgcctgccatgaaaatgcatgctttatttaacaaattagatttaaagcatcatctagatgtaatctgtcttaaaattttgtgaggtttaagaagtgagtaatatagtgggtctatggttttctgacccactggaactacctataaaccaaaaaaacgttagtgtctgctagcatgcaacatgaattctggactaaatagaggatattcttttatgattgtactaacgtatgacttaccctctctgaatctgttttaatatcaataaagtgagaggactgactatgcagccattcactcatttagtggatcttttaaatgaaagactacacatcaggattaaatgatctcttccttaatttcccagactccttggaacctaaaattctagataaggatattttgagtattgagatctgcaaaagcagattatctcaaaaccacaaattattctctcttaaacttcacacaggtgagctggtcgcgattaaatactgaaaatgtgttttttcttaatagggagaagtagaagccaaggttgaagaattaaaatttgatcgttactctgtatttaggcctgggtaagtataatatttatactgaatgagagtatgccactgttggttaatccctagatactaatttttcatttggaaaggctgacagctgaaatatctaagatatgaaagacattggctacaggtagattgcttctctgaaggacacacctttttgcttagaaagaaagggtagatggtggggcctgcttcagaatagtctggaacttcctggacagcatttgctgccttcttaaatcctcttcatgtgccaaataaaaccttacgtctactgtattagtctgcttgggttgccataacagaataccacacagattgggtgtcttaaacaacagaaattttttttcacgcagtctggagattggaagtccaagatcaaggtgccctcagggttggtgtccggtgaggcctcttttcctggctggcagacagaccaccttctggcagtgtcctcacatggcctttcttctttgtgtatgcagacagagagagacctctgatgtctcttcctcttatgaggaccccagtcccatcacactagtcctattccatccttaagacctcattaaacttaattacttcccttaatgccttatcttcaaatatggggattagggcttcaacattagaatattgaggggatacagttttgtccgtaatgcccactgtggtctcagtgcaatttaccacctcttcctctgcttttctttctttcttttttttttttattttagagttctgttatgtgataggcaagaatctcgcccaggtgaatggctggttagaaagytctttggctccttaccagactcttgggccagkgggcattctgtgcctgtggtgaccgtggttagagcaatgctgaacaatgtggtgagaccaagagacaagcagatggaactgctggagaacaagsccatccatgacctggggaaagcgcatggctctctcaagccatgaccacactggagaaatggtttttattgtcaaccttaacacccatcaccaaatcggtaatttcagggtctaaaaaaagtcagcatgttttaactttgttgttttactatcctcaggcatccattccaatcaagaaatgatggtgctctgcatcagtggttcagagcctggttatacatatagatcactcagggagctttggaaaaataaagatttgtcagccctatctcaaacttgaatcaaaatttctggggtgtgggcacaataatctgtaattttctttgtttatacttcccctgatgccactggttccgatgccactggctggggggcctgctttgaaatgcttgtctgcagagtcacagcagccatgaaaaccttatgaccgtgcaaatgagctctgctctaaaattgttgacattcatgtctctgagttacaaaagtgctaattcactacatgtaattgtgtaagtaaacattgtgcctttactacttctttatgtaatagaagttatatacctaagcttatataatacatggggaggattaaataaaggaataaagatgaatggacaactcctgggtgcctcttagattgcttgaaaatgcccatgtagtgtgatatgcagcatttcagcctatggggtgatataatagcagctaatatttaccaaatgcttgctaagtaccagtctttacatgtgttatctgtgctttaaccctcttataaacgatctttataaagtgatactatcatgatcttcatgtcttagatggggaaatgaggctcactgtggttaagtgccttgctcaagagtccaaatctgaagaactgaagcaaagaaatggcagagtcaggattctaacccaggtctgcctgatcccatagatcccatagatcgtgtttttaagcaccctgcaaaagcattctgttcccgtatatttccaggtagttccagttgattgttactacatgttgtggatgaacaaaattgaaatatttgggtttctcctttgttctagtgattaattactaaatgttcacatagccagtaaaattctatgccaccaaactttaaagtgctcatgctgctgcactttaaaaattaaggcaaaggaagatgcagaaggaagggtcaaagccaagaggaacatacattgctaatttccatcatagaacaaaagatgttaatgtaacttgtcttaacgtctgcaccagggaagcaaagtgattcgagggactcagtcaattcttccaaggcctactgtatgccaagtacatttcaagcttcagtatacactggaggataaaggccattctccttaatttggagtgtatatccttagaagggagaagacattcccagtgtcagtcacccaaaaaagaggcatattttagggcagggtgggatattgaaatgtgagctttaaaaggaaatgaaatatcttccttctgccaggtggggttccctgggagttggactttgaagagcctaagtgtgttgttttgatggtgaaaaagcatgggccgaggatatgttgaggcctctgggctctgaaagcagctaaacccagtggcctgttttaagttattctccttatattatttccttactcacaaaccttcgagcaggtttcattcaacatgttattctggtctcagtagtgatgtgggataatgaggaagggtctgtgttcacctttggagtagagagaaaagcagccctctcttgagctctgcattgtggtgagatatgaacttactaaggaacaagactctggcccaatcactcctccacaatgggtgttaacttgttttattgtcaacactgaatggactgggtgttccatttagtactaagggattcaggaagttttccaccaaatgttacacagacagaaaaagtttatgttggaaggatgaagggaaaagttggatgggcccaggtaatcaagtgttcattaattcattcagcaaatgcttattcagtgcctttcatgtgccactgagcacacaggcactggggatgcatccatgaacgatgactccaactcaagagagccagcagctattctggcaatgtcctaggatgtaagaaagcttcaaaattaatatgtgggccgggtgcggtcaatcacgcctgtaatctcaggactttgggaagccgaggtgggcagatcacttgaggtcaggagttcaagaccagtctgaccaacatggtgaaaccctgtcactactaaaaatataaaaattagccaggcatggtggtgagcacctataatcccagctacttgggaggctgaggcaggagaatcgcttgaacctgggaggtggaggttgcagtgggacaagatcgcaccactgcactccagcctgggcaaccgagcgagactctgtctcaaagaaaaacaaaaacaaaaactaatatttaatggattctgtcctccaggaatttacaattaagggagaaaagtacatttagaagtacatttagcaataatataaggcatcatttttattcagtgaatacattcagtatctattaatactatgggccaggccacatattatgtgccagagaaatgaaagtaaagagacatggcccttacttacccttattgttcagtgctgtggggtatcaccaaaaaagaaaaaaaaatcaagtaagcaaatggtgggtgctaagaaactaacaggatactcctgaaataatggtggaaactattttagaaatggcctgaggaaagtgtttctggttgagaccaaagggacctacccatgtgtagaacattcaatgattagcagtaaataaaaggcttaagggtgggacccaaggtgaagggttccattggaaagaggcaggattatgcagggcctgataggccaattagataaactctgctagagcctggggcactccctcctaagcaagaattctgggccgggcggtggctcgccggcaggtggatcacctgaggtcaggagttccagaccagcctgaccaacatggagaaaccctgtctctactaaaaatccaaaatcagccggacgtggtggcgcatgcctgtaatcccagctactcgggaggctgaggcaagagaatcgcttgaacccggaaggtggaggttgcggtgagcctgagatcgtgccattgcactccagcctgggcaacaagagcgaaactccgtctcaaaaatcaaacaaaaaaaagttctatggtttgaagagatataaggaaaggaagaaagggacgtggcatgaggcaggcaggggaacatttgtgttcttccccacacagcagccagattgttactttctcaacacatctgagagcatcactccctggcttaaatagttatgtctgagcactttacatgtattaactcgttttatccttactgtagttctgaagttagtccaggttttttgttttttgttttttgtttttaagatggagtcttgctctgttgcccaggctggagtacggtggcacaatctcggctcactacaagctccgcctcccgggctcaagcaattctcctgcctcagcctcccaagtagctgggattgcaggcgcgtgccaccacacctggttaatttttgtatttttagtagggacagggtttcaccatgttggccaggctggtctccaactcctgacctcaggtgatccgcccgcctcagcctcccaaagtgctggtactatagacgtgagccaccgtgccctgcccaagtgcagttattatccttgttttgtatttgatgaaactgaggcagagagaggtcgagtaacttgcccaagatcacagttacaaagtgacgtgggtaggattcaaacccagcaggctgcctctagagttcacgttctcacttaaccaaagattaaaatccgtcttggggggtttgacacctatctgtccctgcagtagacccaccctggcccatgcagttcgttccctctcgccagctgcaccccctccaggacctgggagcccagaaaccagccgagcctccagcgtttggcctcctccgccaccagagggcgtcatgggccgatcgcccctccgctaaccgctcatcccaggaaaaaggggcgcacagaggacaggatgccaaccccaaaaccgcagcgacgtctctctgccttggggctcacagcagcgggccgcgacctcccactaacgcctgccgcaacccaaggaggagacaaaagtcatcttccgggctgcaacattaaccgtcatcagcgcgcctcytsagcgcgcactgcgccaaccctgcggcaggaggaggcggagcccccgctctcgccccgcccccayctcacgtgacccgcacggcgcctcgaggccggaagcgattgcgagccagcgcgcgcgcttcggcgttcccggcggtctgcgamgtttccggagcccsggtcccgccgcgggttcgcgcttgtgctcgcgctcgttcctggagtcggcggccgctgcgcgcgctcgttgcccaacccggtccccgcccccagacacgccgggctctcggggcaccacagccatgtgctcgttagcgtcaggcgctaccggtgggtaccctggcccctcagcacccggctcgtccagccccaggccgcgccgctgtggggccggtggaagaccctccgggacacgggcccgggcagggtggggggctcgcagggatcatgaaggaggtgctgagtgagggccgcgggcgaacggggcggaggagagcccatcgtcacctgctcctcgagcccccgggccgcaccggtgtccgaggccgatctgattgttgtgtgtgtgtgttaggcggccggggcgctgtggagaatgaggaggacctgccagaactgtcggacagcggggacgaggccgcctgggaggatgaggacgatgcagatctcccccacggcaagcagcagaccccctgcctgttctgtaacaggttcgtccgcctcagcgcctggcctctgccctagggtgcccgggcgcgtggggtctgtgtgcccaggaacgccttcgggcgggaggcaagccagagtggcctgtctttgaattctggaaccactggtctggggtgagggcttgtggagaaggaggaccctcggtagtagagagggggaaccgtgaactggaaggccggttgtactgcaagcttttgactggtagtgcattgaatctgtggttcccaaatcttgtcacttgagacgctgaaaacaaaatgatactgaactctgcacctgaatccttccaagtcagggatggggtctaagaatattctgtttttatgaggacaagatcggaagtaacagtgaagttactaacgagttactactaacgagtaacatatttggcagccaccctgaactagataatccctacggagccttccggctttaccatgctaattctttgaccagtacagagcttctcaggtgaaacatttcttttttatttgagcggtttccatagtctaagaaggaagttcaccttacttaagtaggacttttcacttaaggaaaaagactgtagtatcaataatttgctcaaggtcacaaagctgtggtgtgcttatttccaaactcacattcttgccacttaaaattctgcctgttagtcttgggaagctttggctcctgtcctaggcaagtaggcatgaaagaggcccggttggcattggccggtgttactttaatacattttccagtgttccctgtatctgggcatggtgctgagtggtggtgcgttagtgttctcatctgtagccccattgggtagatagaatgcctgtatatattctagttgtcataaaatatttattgagcaccagtggtacagtggctgtgatagcctccataaatagtccacataacctatctcggtaracatttgtggaaaactaatgctccacatgtgttaggaatatagataaggtatacagcttctctgctgtgtattcctgtctttaagtagccttcagatttgcatgtcacataataaagaggattgatcctcacagtgtctgtgatgcaagtacgttgggaatactacaagatcacttttgaaataaggcacttggggagtatgccagctgtaaaattacattttatgctttatttctaaaagcagtttgagctgtgccagttcaaagcctctgaaagcagagttgacacttagaggagaaaagaatctcaagtagagaaattgtatgacttgagaraaacagactctatcaaagggaactctcttaaaagccttttgataaaatcagtgatattatttgacaaataaattcactttgacatttaaaggataattggttttaggtataaaatgggactcagaagtactaattccctttaaaagtgctggattcccttcctttcagatacaagtgtgtttgttttttcttaattggaagtaaaactagaaaccagcagagttaaaaaaaaaaaaaagtgtatatgtaacatgaaatcagtatttagacttcttaggggactattccatgaagctattgcttgatttttcaggttattcacatctgctgaagaaacattttcacactgtaagtctgagcatcagtttaatattgacagcatggttcataaacatggtgagtagtttttagaataaaggcaatttaatttgtgaaatttgggcaggcatggcagctcacacctgtaatcccagcactttgggaggctgaggtgggtggatcactttaggtcgggagttcaagaccarcctggccaacatrctgaaaccccacctgtactaaaatacaaaagttatctgggtgtggtgacgcacacctgtaatagcagctgctcagaagactgaggcaggtgaattgcttaaacctgggaggcagaggtggcagtgagctgagatggtatcactgcactccagcctgggcaacagagtgagactcttctcaaaaaaaaaaaaaaatctgtgaaatataagttcagattttatagtttttcagacccttttctgtacgagtttaatatggcgaatcacacagcaacatcttgtggaaatggagtttttttgacaagcggtccttgagaaaagatgaataagtcactcttctagacaagattcactgtatttaagcttatattagcttttcaactaaaaacaaaaacagacttggcatgtgattacatttttacattttatgtgattacatattagatttagggagagcaagtgtagatgtaggacttgaaaaaggacgcaggtcatttgaaaaaagacaatcagctcaaagcatgacatgaacttcacagcctacgagactgagttttatacaaagttcggtagagactggaaaaagagtgatgaagttaagattaatatgcaaaatactcaggtgatgtttctattgaaacttttatttaaacacacttgccttamaattaaggccttccactttaaatggatgtagaagagctatactacaataaaattaactaaataggccaggtgctgtggctcacgcctgtgattccawcactttgggaggccaaggcaggtggatcacaaggtcaagagattgagaccatcctggctaacccagtgaaaacctttgggaggccaaggcggatggatcacaaggtcaggagatcgagaccatcctggctaacccagtgaaaacccaactctactaaaaatacaaaaaattagtcgggcatggtggcatgtgcctgtagtcccagctacttgggaggctgaggcaggagaattacttgaacccgggaggcggaggttgcagtgagctaagatcatgccactgcactacagcctgggtgacagactgagacgccgtctcaaaaaaaaaaaataataggttttttggtccctatatttgttgacaactaagaagggacattactgaagaatagcaaatactaacaggtgtttcagtgtcagataaatacgtgatatcacatgtttataaatcataaattcaactgcaagtactttcgtaaggcataaatgacagcctcattttttaatgttttttgtttttgttttttttttgagacggagtctcgctcttgttgcccaggctggagtgcaatggcacgatctcggctcactgcaacctccgcctcccgggttcaagtgattctcctgcctcagcctcccgagtagctgggattataggcatgcaccaccacactggctaattttgtattttaggagagacagggtttctccatgttggtcaggctggtctggaactcccgacctcaggtgatccgcctgccttggcctcccaaagtgctggggttacaggcatgagccactgtgcccagccttaatgtttttaatgttgcatttctaaagtattagaatcatacttaagatagaattttgttttgttttttttttacttaccgatatagggggtttgtatactattaaagctttctcataacaagagttttatgacaaataattggttggttggatgtattactgctttcctttgttttaaatgctgcttcatttctggaaagatacgagaaccagataacaagccttattgggcttgcatcatttaacttcatgtaaaagctagtatacaccatgtcctggcaaaattataatttgatacacaccataaaaattagggatttaatactttcagctctgatatcagttgccaaatacttggtaaaatgtggatctaattttccagatttgtattgttctgacaaaggaggagtagaattttagaaatcagtttcccatctttttagaaatactagaaaagctttaatttgtcatctatggctgcttctcaagatattcagaagtatcattgtaktactacttctaattcttaataaaattcaaaatataagtagtaatttagaggtcagaattattttattgtttaatcagagaaggctttatagaataggtcagttaaacaaaactcattatgttaacataggtgaattatctttttccccctttaggacttgaattttatggatacattaagctaataaattttattagacttaaggtaagttgacagcttaatttataatttcgtttagaaatcaaagaaatgctacagtgactgtcagtgtactgattatttaaaagaatatgaggaactgcattaaatttggtactcatcatattgggggaatcacggacattaggaggtagcacagcagaaagcaccatgtaaatgtctaccataactaacaaatattgttttcactgcatctaagagatgaatcggtgtatgtgaaaaagtaattcagtgtcaaataaagggaaatactgatggacaggatctgtaaaatgagaaataatttctaatgtgattttaagtattttggttgctcttttttattctgttttttttcagatactttgtttttttttttttttgtcctgtttaaatgaatgtttaatgacatgacaacgctttccccaaatccaaacagtaaaaaaaactctgcgttgaaactgctggttaagcagtcgtccagcaagttaatgaaatgacaggcacgtagactttttggagacatactgactttgtgtaatgcaaacatgatttcctttttgtttaatttctgtagtttttactaaggggattttgtgattatatgtaatgaaaaaaacatgagattaattttatatccagaatcctacagttgagtacatgaattccatatacaacccagtgccttgggagaaagaagagtatttgaagccagtattagaagatgaccttttacttcaatttggtaagatgaacataagtgtatctcctttaattaacataaggccgtttgttaacggcaaaatggaggtagagtgttttaggaaaagacatgctttttaaaattatctaaatgcttcatcaggtagttagtttcagtagaaaagttaagttgcttaaaaactaatagtcggccaggtgtggcggctcacgcctgtaatcccaacactttgggaggctaaaagggcagatcacgaggtcaggagatccagaccatcatggctaacacagtgaaaccccatctctactaaaaatacaaaaaattagccgggcatggtggcgggcttctgtagtcccatctactcgggaggttgaggcaggagaatcacttgaacctggtatacaggtgacagagcaagactctgtctaaaaaaactaaaaactctgtgatcaaaagattgtctggttttgcctttaattgcttcatgtattttggagctcttatgtgaggtttatacacatttataattgktatattttactgaaaaattggtcagcttttgcagtaattcttctctgcccgaaagaagtatccaggtgatttgaacatcctgagacagaaggtagatgtagatgttcatctttctgaatatggtttaggcctttgaattagactgttctagcaaattgtagttaggaatcttaatatttactgaatcctctttttttcaaatctctaagtttaatctttaatatataattatctgcatattcttaacattaaaaagtttttattatgactaatttttattgcagcagaaagcaaaacagaaactggccaaacagtttgaagaattttgaaatcaaaatacaaaatgaggtttgtagtaggaagtagaaaatacagtataccagccttatatagtttggaaatattttgttgtgctgattaatttttggtgaattagatagtgaatgatgcagtttttaaacctcagtgactcaatattctgccacagtgatgagaagttagtgacaccctgcactgcttttataacaagaattcaacttaggctgtagtctcttatagtataatgcattcgtttggcttagccattttgtcctaattccaaggacgtgtcttcacaactaaaaaatgaataggaatttttacgaagtcacatttcttccagtgctatcctgaggggaaaatgtaatatttgcactgctcactgccttaagttgatccgaaagttagatcagtaaatggacactgattttgtgaaattcactaactacatatattaacttctctttgtagagaagtgaaattaaaattaaatactaggaattaggatatttaataatatcagcaataagactttagtgtatagatttcactccaccttgcccaggatgaaaaattattgaatgtgtagaattctttacacgctgtccttmggaatgttttttttttcctccagttttattcaggtataattgataagtgaaaattgtgtacatttcaggtatacaatgtgatgatttgatatgcatatacattgtgaaatgattaccataaccaagctgattaacatcatcacctcacattccatttttttatttttgtggtgagaacagttaagatctattgtctgcaaatttcaagtatacagtgcagcatttttaactatagtcactttacaatagacagatgcccagaacttactcatcttgtagctgaaagtgtgtaccctttgaccaacatctcctcatttccaccaccattccactctctgctgctgtgagtttttttttaattccacacaagagtgagatcacacagtatttgtctgtttgtgtctggcttattttgcttcacataatgtcctccatgttcattcatattttcatatatggcaggatttcccttaagcaatatctgaatttaatacctgctacaataaggacatgggctaggaggtggctttgtgtaatgggaagaacgtgggctgggaaggcaggtttgggtttaaatcttagttcctccataaacagatatataactttaggatagtcacttaatttctctgaaatttattttttccttgcctaaaatagggataaatacatcttaactgtgttttgagaataaaacaagatgtaatgatgtactggaaagatacctgctgatcaataaatattaggtttttttctttctacttttttctttcttcctggatttggttgagtataattaataattaatatttaaatatatgttcagtttagccaactaatgaaaaacttagactaacagcatgctctttgaattcaaattaaaatagtgtagatgataaatatttattattattattattacttttaagaccgagtctcactgtattgcccaggttggagtacagtggtgcgatcacagctcactgcaacctccgcttccgaggttcaagcaattcttctgcctcagcctcccaggtagctgggactaaaggctcgcaccaccagacctggctaactttttgtatttttttttttttagtagagataaggtttcaccaaattggccaggctggtcttgaactgttggcctcaagtgatctgcctgcctcggccttccaaagtgctgggattacaggcaagagccactgtgcaaagccaagatgattaatattcaattaaaagtactttcactaatctttctcaattggccacatagtagaaacttagggcgtatttattcctaacatatttatacttgttttattgttataagatggcctgataataatgtccatttatttctttagatgtagaagatctttatgaaccggtgtcagtacccttctcataccccaatggactcagtgaaaatacatctgttgttgaaaaattgaaacatatggaagccagggcactgtctgctgaagccgcattggccagagcacgtgaggatctgcaaaaaatgaagtaatttatcaatcttgcaaaattaattgttttagatctccagaataatacaacctaatggcaaagtagaatatagtagaacatttcatatactggaaagtacaatgtagatattttatcttcatactgttaaagatatgtagcatttttgtacactatggatatagttaattaatataaaatcttatagttttacctattctgatatgttctgacaaatgttgtcctcatgaatgtttttgttctttattgccttcctttcagttttcctgtttgcattgatttctccattttactttttctatcctagttttttaaagtggaaggattaatctttttgaggtttggggaaaatacagggttgaagtttttagttttaaagaatcaaaatgtaggccgggtgcggtggctcacacctgtaatctcagcactttgggaggccgaggcaggaggatcatgaggtcaggagtttgagaccagcctggccaacatggtgaaaccctgtctctactaaaaatacaaaaattagccgggttgtggtggtgcacgcctgtaatcccagctacctgggaggctgagacaggagaattgcttgaatccgggaaggggaggttgcagtgagctgagatcgcaccactgtactccagcctgggcaacagagcaagactttgtcggggtggggtcggtgggggggaatcagaatgtaattatggtgtagtatgaacccagaaaaccagatatacggtgacagttttttccagtgaataaattagcattctactggtgtagtacttttcaaagtttaatgtgcataggaatcaactgggatcgtgttaaaatataaattctgattcagaagattgagaatagggcctgagattctgcatttctgacaagtatacctcacaggccttcctgttggatttgtaagctgtttgctgttgcctgagtacccatctgatggtttgccagaatgaatgtccagcaggaaagatagtagagccaattgtagttcctcttccctgtttcagaatttttatgctaggtaaccaagtaaccaacaccagctctaccttttgcccctttgaacttctcccttttatataccttatggattcctaatatgtcatgatctgagagggatctaagttttagagctggagtgggcggtgctggtgtatgtaaataattatctatttgggtctactttctgcttacataatactcccaagaaataatatggttttaaagaatattaatagagctgaaataaacgacattgattcatttgctaaaaaaggattttaaaacaatagaaataatagaggattataaaagtaatatgcttatttgttcagttgaaagacataaggagctacaatctgcggttggcattgcttttgtggtttgtagaaggagtatgtataattgtttctgaatattgccaytgcttcagatccagcagggggagctttcagttgttcaagatagaatgtgatttagaagactcatcacactgbactccctcccctttcctcttcctcaacctctagcctttcctttattcatggtccaataaacctgtctcaagggtgtatttcaaattgattacagacaatttgctcaggattttgtgatgcacacagatgtcagaacctgctcgtcatctactagtgtcattgcggacctccaggaggatgaggatggtgtttatttcagctcatacgggcattatgggatacatgaagaaatgctaaaggttagaaaagaacacaaatgcgtcaaatccatactaaaggaaaaatagaacaggttctttcttaatatatgtgtgcactataggagacctcttttttttgggtggggagaactgctttttaaacacctctttggtgcttggtatctcatcttgggttgaaactattacaagactgggcacggtggcacatgcctgtaataccagcactttgggagcccgaggcaggaggattgcttgagcccaggagtttgacaccagcctgggcaatacagtgagaccctgtctctatttaaaaaaaaaaaaaaaaaaaaaagattacagaggcatcagtcatttgtacattccatttaaaatcattaatctttttatgaaatcactttttccttaaaatattggaaaaacgacaattttagtcttctcaagggcagctattaaatargaacaattagatggattaaattatatrttaccttttaacgtgtaaaggaaatgattaatttcagtgttttaaatagccatactgacttttgtttgggccaataataattctttgatataaagtttaattataaatctcacaatttttatggtgtaagttttttacatttgaaataattgacatataggagtatttcctgaattggtcaaattaggtacagttgtgcactgcatgctagtgttttggtcagtcagactggtgtgatggtgcttccatgagactataatgccatatttttttttgttgttgttgagatggagtctcgctctgtcacccaggctggagtgcagtggtgcgatctcggctcactgcaagctccgcctctcaggttcacgccattctcttgcctcagcctaccgagtagctgggactacaggtgcccgccacggcgcctggctaattttttgtattttttagtagagacggggtttcaccgtaatgccatatttttactgtaccttttctatctttagatatgcttagatacacaaataccactgtgttacagttgcctacagtattcagtacagtgacatgctgtacaggtttgtagcctaggagtaataggctatcttacagagcctaggtgtgtagtaggctatataccatctccatttgtgaagtattctctatgatgttcacacaacaacacatttctcagaagtatccctagcattaagcaacatgtgactgtatttaaatctggctggttttaatttttataacggtaatatccatataaaatagaagttgatttctagctatacttgataattatacattttattaagtattatagattgtaaaataggaagatgtaatttttagttcagtgaaattgagaatatctacatagagtaaaataaatgttggaacgtaaaattgaaagttttagatgtttatctctgaattttagatgccaccattacctgttcttaaaaccaacaaacaaaatatccctttctaaatccttctttcagagattgttttattttatggtttccctgaagcataggcatttaagctaaccagggatatttgataacatgtatatattttgttgattcagttttgctggatcacagaatagaagtttggtaattgataattgtacttatatggggtcttttaaaacattgtcatgtcattactaattgcatgtcatggttgtgctttttgttgtcacgtaggtaatggcataacattataaataatagatatgttattataagtaatacgttattttaagtctcagtgaatttgttgaaaagaaattgacttgcttcattttctttattaaaattaatttttttatgtttagagtattttctttaaagaggtttatctagggccatgtttgtcatattaaatcaccccatcagcttaaataccataaacctttcattcctttggtatggaaattgtgttgggcttttcagacagattaaaggtcaccgaaactttcagtagagtgttgagtgttgtgagtacaatcatcagggaaattcagtttgagtacttaccatttacaaatctttatcctggacacttgtatgtcagtaaccataagatttcacacctgctctggtacgtttaactcctttcaatgtacatatagatttaagaagttccaacttgaagtttccagtgccaccttctccctttgagagaatcacttaaatatcattctttgtgccttagcttcctttagttcttgtgcagtgtaatttcctccccttggaaatgatttgattaaatgtctataggacatatggatagttgattcaaaaagaactgtttattcatttgcattttgccaagttacgtgccttggatgaatgtgaagcatgccttatatcacagctttatttcttgtttcttagaacgattcttagcacacataaactgttcaaggtatattaccactagaatcttacctaatttttataaatcatttaaaattgagaaatcatatttacaggacatatttttatgcttggcattggccttgtttttatagagtataatttggattttttgttgcttggcttcatgtctttccatgacactatttttggtacatgttttaattataattttaaataaaagtagcttgtgatcttatttctttagataagatgaagataccttttttgaattccagagatataattgatagagggatagattacatgaactttcagaattccttgccactttatctttttgaagaagagtcatcattggctaacactataaatccgaaatgcatcggtcttctttgttttaagataaacattattcattctgttgtacatttatcacagatcatagtaccatttagtaaagtgaaatttcagtaatttttctttgctgcattctctttattgtatctgcacctgtctcatgcacttggtccacctttatgagcttgtaaattaaaaacatactgttgcttgtgtatgtaaaatttgtagtatataacttttttctttaccttcattcttttttttatatttgtaggaataatttcttgatactttactagtcttaaaatattatcttgctcctaagtattggagcagtaattttgttattttatttttcttagtttcaaggttgatataaaaaaaatttttaaatttctgtttattgttgttttgtattgacgtgttagcctttgttagaataaatttttagaaatggttataaaggctactcttttatttgcttgcrttttcgtatttattggatttttttttttccaaaaattaagtgactgaattgaagctctgctatatacaagacactatgttttgtatactttggatttcattacaccagcatgagcatacaaacaaaaacagatttatatattgtaagagccagaatgaaagattgtagtttagttgagcagcagtgcatrgcattaggatagcagttggaattcttttgattaagggkwagtrgtggtcaggcagtatgattagtgggagctttctgagtgactgcattcctgactgatgttcactctgtgtaagttttgtcgtttctgcaaaaatcactggttatagtatcagaagagtgtaaaatttgtaaaagtgtatgaaacggtatgctttgaaaaaaagttttaaaattagataattagttaatatatatacatttattcatcttagtaattcttcaggagaagatttaataatttttttgtaaagcagtgagaaataatcagaaaacatggaattaattatggacaattccctttttaggtctagtacttaagtaaaacaacttgccctttaagatctccttttatgcattaaaaaaaaactcaattggcataaaaatgtattgggggtatgagttgtataaaattttgatattgtagcaattggtgtaatatgtccttttcaccctaatgtgaaacttaaaactagaattcccattctatgatatttatttttatcacagtcatattttacttacttgacagcagagcccctaactgcttaatttgcagtcagtatgtgtttcaacctagggaatcaactctgttcatgaaccagcataaatgttagagttacatgtttgccttggtcacaggttatgggagactccagagtgtaggagccttataatgtgggctgcagggctcaaatgatttacttttaggcttacaggcttttaaacatcatttcctactacagaaatttttacagacaaaacaggaatgtaaatcagataggtgctgatcaatgactttcttagaaaaacgtatccagtttagtgtaattttttgtatgtagctgaaacgtatccagtttagtgtaattttttgtatgtagctgcaatgtttacatttatttacttttatctcctttctatttttgtttttgtttttttttgttttttgagacggaatttgcgctcttgtggcccaggctggagtgcaatggtgcaatctcagctcaccgcaacctccgcctcccgggttcaagagattctcctgcctcagcctccccagtagctaggattacagacatgcgccaccacacccgactaattttgtatttttagtagagacagggttactccatgttggtcaggctggtctcgaactcctgacctcaagtgatcctcttgcctcggcctcccaaagtgctgggattacaggtgtgagccactgaacccagcctgttatttttatttctatttttttttggaggcagggtctcactttgttgcccagcctggtctcaaactcctagcttcaagtgagtattacaggcatgagccactgcacttggcttctcccttattttaatatagctctagtacagagaatcaggctgtagtttccaggccctgttgaaaggagcaaaacatgttcatcttttattagctttaattatcactctaagtcttatggtgataatgcacgtcaagaggaaaatgtacgcatttttaagaacttgggtcttatttgagtttcagtcttcataaaatattttctttgtgtgttgttgctatttctattctttattgttttcttaggaraaaaataagcttggtatcccaggtataaaaactgctrtggaaactagcaatgtgtgttaatatggcaaatatctcccttaaaaaatttatttgtttagactgtcctataaacacagcrttttcctctctccaccctaggacaaaatacgaacagaaagctaccgagatttcatataccaaaatccacatatcttcaaagacaaggtaagtagtataggttatagaattatacatttcatcttgttcttgggcagtagaaatcctctmttggctcatcattgtgatagcaattgatttaacatcttctgtctgtatttcatggaagacatttatgatgctgctctgtggtgcagagtaccaataacaaatgctgattgctgctgtcattcagtatgctcttttttaaaattgaaagttattacaatggcgtaacttagttataatgacagagcttagttaaattttgcttattcagataattttgcttaaaccatattttttgtttacagttattcccatgaattttaaatgtatcagataagcaccatgtcatagcatacttttaattattactctagtttgtgttaagtaattgagaattaatgagtttaagaacaataagggttcactatggtagtatagtatttagtttatatgctttattttaatactttatttaccccatttagagatactttgtattttacaattaattttaatattggctcaagttatttaaaaaatgatcttataccctgtgtgtgcatgtgcctgtgtgttagaaatttgtgttttttggcttttcttccttacacttttttttttctttattctctttttccctctctcttttyctccctttatacattggcatggttacttaaaagttcaggttttccgtttgttcttcctgatgggaaactagtcccctaatttaatcaggaatattatgatctctgccatttatatacctttccttggaaattttttcccactctttttactttgagaacatgtatattgataatgtatcaggttgttataattcggctttcatctctctaaggttacttcatggggtttacatgatatggcagcagtaacaacttttgtgttttaaaaatcctttttcnnnnnnnnnnnnnnnnnnnnnnnnnnnnnnnnnnnnnnnnnnnnnnnnnnnnnnnnnnnnnnnnnnnnnnnnnnnnnttttaaaaatccttttttccctgatttttgtattgtttggaatataatctggattggcttttcattttccatacctcttttttaagagcagtgtttcacttgtgagttggctgaactggacagatatactgtaatttatatggtgctctgatctttttggccaaagcattgcacctcgtgaaaagtttataattgtttgtgctgattcccaccagagacaaataaatgatttcatttaaaaattatagttatcagttttttatatttagttttttttttgtatgctttctatatgttactatagtggagacttttcatagtttttgkttttttttttttttttttttttttgagacagagtctcgctttgtcgccatgctggagtgcactggcgcgatctccgttcactgcaacctccgcctcctgggttcaagcgattctcctgcgtcagcctctggagtagctgggactacaggcacgtgccaccacgcccagctaatttttgtatttttaatagagacggggtttcaccatgttggtcaggatggccttgatttcttgaccttgtgatccgcccgcctcggcctcccaaagtgctgggattacagacgtgagccaccacgccggcccttcatagtttttatatttgcaaaacaagtgctggaaagcttatttaatgtttgtctaaaaaccactctgtttccagtgaagcaaattatgttgctgttaatgatgttgctttatatttctagttggatgatgcccagatttttattttattttttccttaatatgttatatagagatgaaacatgagaatcactaatcctggctagtctggaaccagttatatacttttgggcaagtggtgaatctctttgggcctaacctgtaaggtgattgtaaaaattccttctggttctaaaattctgtgggttttattacggtgagagcattatcattgtttttcttttagccatcttctcttaatacttggtgataggaataccagaggagcttgttaagaaagtaagttagaatgttccttcagtatgcttctgaatggacttgtcttataataggtaagtaaatactgaaaaggctcaagtattagtaatcataagattaatcatcaagatattaaatatttttattaaaaatgttttctttccttttttccttcccttctctctccatcccttcccagcctccttttcttccttcttttcttaatattatttcaattcacaaagctcctgtggaggccatatggtttctcagattaatttaactttgggtggtatttaatcgtgttgtcacccactcataattaatttctgtttgtagtttattgaagaaattcccagttaggtgccttctttatgcttgtgattattatctacagttaaaattcattcagttttttaagaaaaaaaatgaatcaaatttcctcatcattttataaaataatgttcattctatttctacctctttgattctatcaaattttagctaatctgcttgatcacctaattctaagctagatgtgataaataactaacatacaattaaaaatataggctttagaagaaggttaacctgtgtttgaatgcaggccctacaatttaccagctgtgtgaccctggacctatttctttgcctctctgaagctcacattcttcatttgtaaaatgagaattaaataaggatttcatacacatacacatatatgcatttgtatatacattatatatgaatgtatgtatggatagtcttacaaaaaaacacatactcttattggaatatactaaacatatctttctatacttaactttcttcactcagcagcttttcttggagaaattccttattatctttttacccccgtgttttttcttatggtaaataaacatgatacaaaatttgccatcttagctatccctaagtgtataggtaagtggtattaaatacatttataatgtcatgcagccatcaccacctccatctccagaactcttcatcttataaaactggaactgttctcattaaacggtaattccccattctcccttcctcccagcccctggaaatcactgttctactttctgtctctatgattttgactactcatatacatcatataagtggaatcttacagtacagtcgttccttcagtatctgtgagggattggttccaggaccctctgtggataccagcatccacaaatgctcatttaccggatataaaatggtgtagtgtttgcatataacctgcacacatcttcctgtgtactttaaatcatctccagattacttataatacctaatacaatgtaagtgctatataaatagttgttatgctgtattgtttagaaccgtgacaagagaaagaagacttcatgttcagtacagaagcaatttgttttcccgaatgttttcgattagcagttggttgactccctggatggggaacccarggatataaagggctgactgtatttccttttgtaaccggcttattgcacttagcataatgtcctcaagatttgaccttgttacagcgaatgtcagaatttttttcatttttaaggctcaataatccattttacatatgtatgacattttgcttatccattcattcatctgtctatggatatttgggttacttatatattaaagctgttgtgaatattgctgctattaacataggtatacagatatctcttaggggccatgcttttaattcttttgggtatatacccagaaatgaaattgctgagtcatatggtaattccatttttaattccttgagaaatcactgtgctgtttttcacagtgggtgtaccattttgtattcccaccagcagtgcacaagggttccaatttttccatatccttagcaatacttgttgttttctagttttttgataatagctatcctagttggtgtgaggtgatatttatattgatttgcatttttctaacgattagtgattttgagcatcttttcattaatattcttttaatagttcgtatatccaatgtaagaatgtccataagttgtttcagtttttatgttagaaacaatgcttcatataaaatattaaaaatatttgtatacatatgcgagcacaattataaggtaatttgttagcactggactccctaggtcatgaagggtatataccatgtatggtgtcaccagttgtgctgccagcttgtctttggtacacagcaagggagtgttgatcttcccagacagtatcaccaaagcactttcagcaaacttctaaattccacactgatcttttatttttcattttttagttttgtaaatgttttattttaatgagagtttctggaaacttattatatactgttctattgtgtatatttttctattttttcattttctgccgtacagtatttcaagttgaggtactataactgtactggatacatatatactatgtagtatactgttttcttgccatttttgttactaygttttatttggaacttttaaaaaattctttttgtttgcagtgatgtatacagattgcatgttaaagtaaaattcttaatgtttataaaagtaattatgttaaaatgtactgactcacccagacaggccatgtgttcaagaacagacaaattcccactgaaaccatctgggcataggataggaagcacaaagtagtagcctttcaacaactttatttcttcagtggrtatcaggatggttagattatctctcttctggagtcaatactaataaattataatttcaataygtaatggaaagagccgggcatggtgactcctgcctrtaatcccagcactttgggaggccaaaggattacaggcgtgagccaccgcgcctggccagtttcagatttttattgtgatcttttcctagccagaaacatcataatatatgaatagaatttaatatagagacctttttgataacatctgttttgttttggttttttcttaattaccccaggtagttttggatgttgggtgtggaactggaattctctctatgtttgctgctaaagctggggcgaagaaggttcttggagttgatcaatctgaaatactttaccaggcaatggatattataaggtacatatattttaagccttcatttaagattattttaaaatttaatgattatttaatagattttcttgtctttagtagctatctaaggcagactaaagacatttgtcttttagtaaaaattcactccagaataataagattttaagttgaattgagctagacacatttgagctatgctgctgaataatcttttcacagttctcattgatgagaattatttttatattgttttctggctttctgactatggctataaatatgccaattctaataatataaaattaaaaactattgatacttagagtaatactgacagaggactccctacttactaatatatttattatatattagtaatattttctttagcaaataccagttatactaaagactaagagttatttgtcttttccttttrtaacaacactagtccatgtacctccttcaaattaagtaaattccaaagttgctgaaaacaaggcagagtggatttagtttattaccccctaaaacttttattctctaaaaatctctgtcttttgagtatttagctgggttgattgattttacagttggcttataccctagtgagaaggcctttatttgaaatccagctgacacaactgaatttctttccctaygtgcttaacaaaagcaccttacatttggaacttaggagtcatttccagaatatgtgattaataggaggcttctcatagcaacttttaagtgattcttcaacttacattgctgttccactcttaagattgattaatgttggccaggcatggtggctcatgtctgtaatcccagcactttgggaggctgaggtgaaaggattgcttgagcccaggagttcaaggccagcctaggcaaaatagtgagactctgtcctcyataaaaagtgttttaaaattagccaggcatggtggtgcatgcctgtaattccacctacttgggagactgaggcaggaggattgatagacctggggaagtggaggctgcagtgagccgtgatcatgccaccgcactccagcctgggtgacagagcaagacactttctccaaaaaaaattttttaaatttgattaatgttggtcttttctgattagtttaaaaatttaaatatgattatataaaatatttannnnnnnnnnnnnnnnnnnnnnnnnnnnnnnnnnnnnnnnnnnnnnnnnnnnnnnnnnnnnnnnnnnnnnnnnnnnnnnnnnnnnnnnnnnnnnnnnnnnnnnnnnnnnnnnnnnnnnnnnnnnnnnnnnnnnnnnnnnnnnnnnnnnnnnnnnnnnnnnnnnnnnnnnnnnnnnnnnnnnnnnnnnnnnnnnnnnnnnnnnnnnnnnnnnnnnnnnnnnnnnnnnnnnnnnnnnnnnnnnnnnnnnnnnnnnnnnnnnnnnnnnnnnnnnnnnnnnnnnnnnnnnnnnnnnnnnnnnnnnnnnnnnnnnnnnnnnnnnnnnnnnnnnnnnnnnnnnnnnnnnnnnnnnnnnnnnnnnnnnnnnnnnnnnnnnnnnnnnnnnnnnnnnnnnnnnnnnnnnnnnnnnnnnnnnnnnnnnnnnnnnnnnnnnnnnnnnnnnnnnnnnnnnnnnnnnnnnnnnnnnnnnnnnnnnnnnnnnnnnnnnnnnnnnnnnnnnnnnnnnnnnnnnnnnnnnnnnnnnnnnnnnnnnnnnnnnnnnnnnnnnnnnnnnnnnnnnnnnnnnnnnnnnnnnnnnnnnnnnnnnnnnnnnnnnnnnnnnnnnnnnnnnnnnnnnnnnnnnnnnnnnnnnnnnnnnnnnnnnnnnnnnnnnnnnnnnnnnnnnnnnnnnnnnnnnnnnnnnnnnnnnnnnnnnnnnnnnnnnnnnnnnnnnnnnnnnnnnnnnnnnnnnnnnnnnnnnnnnnnnnnnnnnnnnnnnnnnnnnnnnnnnnnnnnnnnnnnnnnnnnnnnnnnnnnnnnnnnnnnnnnnnnnnnnnnnnnnnnnnnnnnnnnnnnnnnnnnnnnnnnnnnnnnnnnnnnnnnnnnnnnnnnnnnnnnnnnnnnnnnnnnnnnnnnnnnnnnnnnnnnnnnnnnnnnnnnnnnnnnnnnnnnnnnnnnnnnnnnnnnnnnnnnnnnnnnnnnnnnnnnnnnnnnnnnnnnnnnnnnnnnnnnnnnnnnnnnnnnnnnnnnnnnnnnnnnnnnnnnnnnnnnnnnnnnnnnnnnnnnnnnnnnnnnnnnnnnnnnnnnnnnnnnnnnnnnnnnnnnnnnnnnnnnnnnnnnnnnnnnnnnnnnnnnnnnnnnnnnnnnnnnnnnnnnnnnnnnnnnnnnnnnnnnnnnnnnnnnnnnnnnnnnnnnnnnnnnnnnnnnnnnnnnnnnnnnnnnnnnnnnnnnnnnnnnnnnnnnnnnnnnnnnnnnnnnnnnnnnnnnnnnnnnnnnctcatctttagatctttcacttataaagccagagctaacagaatgtctctttagcaatacttacaggattcgatacaaagatgtttttgagataacttaaagttaactcagctaagtaagcacataactaaaagtattttaacaagatttttatatagtaataatgagatttaaacccagcaatctagcataatagcttttcattaaaattattagggttcaagatacctaagacctaaaatttgagctctgtcagtttcttaggataaaataggtagagacatgtgacttatttggataaggatcctctgtctgtaatcattgagtcaaaatacttgtcttcagtcttttctgtgtgtatttttggaaagggagtctgatcattttgtccgccagatttttgaatctcaaacactaattttaatgtagtgaagtaggaagtacatatgtcaaactagtctttgctgtgtcaaatattttatgcttaccaatgtttattctctcaatcttgtaaagtgtcatttttgtaagatttcctgctagctccaaagtatatctagaatctttgcttgagtgtcagatgtagttataggaaggaagcatagataagaagtgcagtgaagaaatcaaaatcagtttcactactgcaaataattattttcttgctgtaatgttagcagtcagagaaatagcatttgtgacaaagatcactactaaccatggagagtataacaaaatgactaaaacttaagtttatattcagttaaagtaccaatttagctaagtgaacattttgcatagagcacatatttactataaataggcttttgcaaaaaataatcacattttaaaaaatagttttaaaacgttgcacatgagagcatatacctagaagcttagtgaggaaaagttttattatacagcaggttcacagttgattcagagggaacagccatgtattgtgactttgtgataatggatttttaacaaaacaaattgtgtccacataagacttgtttttttctaattatctataaagctcctgcatatgttattttccccctttgtacagtgtggaaattgaacawgtagatgtatttaaaggactaaagaagcagacttattattatctcacagtttttagtactaatgaccaagcttgtactctagttgcttgttgaatgctttgtcactcaattcctagttttcttttcagatggaaactatcaaaggctatagttgttattatcaagatccagtgatatttgtgtagacctttttgtcttacctcatgctagatggccatgtttaagattcattatagacattatttttgccaatcattactagagtcatggtcatcagagcagagggaagcatttgttcaccagatccattttgcaaaaatatgaatttttaaaaatctgttcacaaaactgttgaacagctatgtagtctgaacccccccccacytttgttttgaagtatcagagagttccttaaaaggatttttgaaattttcagccatacatgacagtagagagaatgatatgaattcctgtgtgcctatcacccgcgtctacatttatcaatttttcacgattttttttatacatttccctcccaccttttttgttttgtttttgtttttgttggagtattttaaagtgaaacttatacattatatcagtaaatgtgtcctaatacatttgagtgttggtgcatgagaacatttattgaaaatgacttagcactcaatctttagatatcccagtttaataataaaattgctaacattagttttttctattgaatctcctttggtgcaggtgtaactgaatctcctttgatgtagattatttatacctattataagagattaagaggctgggcatggtggcatgtgcctgaggcaggagaatcacttgagactaggagttggaggctgctagtgtgctaggattgagcctgggcaacatagtgagactctgtttctatagtggggtcagaattagttaccaggcagcctgactccatagcttatcctcatagccagtttgcaattccttatctccattgaactacttacaaggtatgtattggttgtattcagtagtttgctttacttaaaacctacggatagtttgaaaagcaggcctttttgttttggataagccaacattgtactgtttcttcagaaatgttctttgccttttttatattgtgaaaaggtagttatttttatagtgttcatatgtgtctctcctttgtcttccatttgaaattttaaaatttggagtgaaatgccttctattcctctgtgaatgtacttctaaaagaatatgtaggaaacagttaattgttaatatcactgcagtttactgactcattattctaaccagttgaggaggccgcatagcatgctcatctcagcatccagacatgacttgagttctaatttttctttcactacaacccctttaagccctgatttcttcatttataaaatgaggttgatggagtcttatctcataagattgttacaggaattgtatccgttatgatgctttgcaaaatggctggccctgtaactgcttactaaatgttagcagtaatgatagtcatgttaattattagtagtggtcatctgtttggcttggcatcaatgcctcaaataatattttacgtttgggtggttatgtttctaagatggacatttattgcagctatcttgtcaaackgactacttttttgtcttctttctatttcacaatctctattctcttataccataaaacttcaagctttagtcgtactctgtactcacttgcctctcttcaactctgttcttaacttctctgatacttgtctattcttgcatattggagttttctataacatcagtcaacaaaaacagctcttctggttaacaggctctaagttgtccttatcccttctgaggcccttttctcggtcagaagtctatatacagcagaatgtcttctgttaaactccacaagcctacatctataaaaggcactttaaattctaaaagatagatattttaaaaatacatagtcttttattccttcaaacacgtgcaacttaacaattcttggattatgtttaaaataatttttggctaggcatggtggcttaagcactttgggaggctgaggtagaaggatcccttgagaccaaggagtttaagaccaacctgggcaagatagaactgtctctaccaaaaaaataataaatacctctactaacaatttttatcttttttatttaaaaaggtgatctagcatttctaaagaaatgagtttagaattggatacattttggttgttactgtaaactgacagtatatcaggttttaagaagattaggctggctcttctgaggttgcagacatgaataaaacaatacagattttctgagatgttatgttagtaagggcaaataggtctcaaagtgacatatggaagagaatcagaaattgtttcttatttttgctatcatactttgaactctgcagtgaaagatcatttcggcaacataaacttacctaaggatagcaaagctattcagttgccagacagttgtatactgtgtttattatcctcaggaagcgcaggtagcgtctgtttaatatttttaccattattctgggtgcctttggtttctcattgacacagttatggaatagctcattattcagactttcagatgttactgcagaagagtttttaggagaaggttgatccatcatatggccataatgcagtacactcaatctcagtttgacattaaagatgcaatcttttatattgcctgtgtttagaatactgttagaaaggaaacattaagaaaagtctagagaatattttgatttattgtcatgtttatgcaggtgtccttctctagacacaaggacaagagctttatcctcatctttttatccctaacacctaacaaagtgtctgacacacatagtagatgcttagttaaggtttttgaataaaagtgaagtatcttaaggtaatgattttaaagacagtggtggtggtagtgkgtgtgtgtgtgtgtgtrwgtgtgtgtgtgtgtgtgtgtgtattttggaaaaagattacaaaatacaccagcaaaaattcttgacataagggatgctacttcatattttgtttctaagtttaatagaaataacagaaatgtgaattaaagccaaagagaaatttgaaccactgatgaggctaaaatggttttaaaaaaaatttgttcttcaaaagccataaaactctggtgaacgtcatgaaggtcatcaagacaccttacagggaaattaaatttatttcccttcctagtataccccgaaatccccttaatttctgattcactccagtggttctgtctttatggggtacattccatgaccacccactagttcagtgatttactggaagaactcacacaattcagtataaagctgtactcacagctaggattacagaaaagggtatagtgcagaaacagcaggaaaaagatgaccataggcaaagaggtcacaggcagacttccaaggtatctctctcactttttccactagttatacaagactttctttcctccccagcttcatgcctcagaggcacatgtgagatgtctctacccagggaaatttgcatgagtcttagagactgtagttctcaaagctagctggtcaagtaggcatatttccaccatgtgaccagccatggtatacacccaaaccaggtaacaagtgtgcatgatgaatcttcatgtttactttaaacatattgtcaacctgcttcatctaaacctactgcttcaggtaaaatagagtaacatcattattctgcaatcatatgagtgatctgggagttcttgttcttagagtttgatcaagaatcattgccatggctatagagatctaagcaagaactgagtaaaacaaaacagacctgctgcattcactcatttcttccgagttgtaaacctgggattcatacttgacattttcttcccctttacccaacatacctgttggagacagagtcctgttgagtatccttaatgtttctcaaatgtgtctctcatctatccatgatgtttctcatgtcttactttacattcttagatctctcacctgaattaatgcatctgcacttaactggaccagttgtttgtactttgtctttgcctcccaccactctctgtcatctgttctctgtagtgcagccagactgatttccccacttaattctcctctattttaaataaagaggaagaaggggtggggggaagatatgtttgtcttgggaagacataaaagagggtaaattacatatgattctactatcagagactactatcaacattttggtatatttcttgccactctcaaaagccttaggtcacagagatgaaattcataggaatgtaaactttactaaaatatcagctccccgtggtgtggcaggaattttyctttttttcattctttaatgtgtcccaactaccaggaaggggacccagcacatcctaggcattcagtgtaagtacttattcaatgaatgaattaatcaattttcaagattcgggacattacatattcaaagccaggtaaatcattgtcaccaaagcctgcaaacccattgtttctgatagattccagatgactatttttatattttttcactttattagaactgagttattgctaatttcgaacaataaatgtcctcagtgttagtaattccacagctacacgtttgtaaataaagatgatacatttgggagggagcagctcatagaatagcccgttatggttccaggtctatgccccataccttcttggtagttcgtttctcatgggatgtgtgtaaatctacccccagcttcataatgtttaagaattcttgctttttgttgacatttatgaatgaaggactggatactttaataaaggtaactggcataggttttgtctctgaggggaaagggtggagactggtcagtttacagttacccccgtaatgttttagtccctttatcactcccactttgtaaacctcttgactccaatggtttgcgttgtgaagaatggctccacctccactgtcatgctcgctgacgtgtgcactgagtactgggtctttcttcacaggtttaccaatataatttcattcccttttttctctcactgaattatgagattctttggctctttgatattcccttccaaaatctccatgcatttatcagtgtcttacattttacgttattgtcatttcactgttcttagggagcaaaagagaaataaatatgtatacttcgatgacatattgaactgaaagtaaatgaatagtatatattgtatctatttatatctattaggatattcctttcttctcccccataagctatcatccatatattctaggtgaactttaaatttgttttatcactaactttaaatgcactcgattaggtgttcattgtatgaactcacatgtactttatgctgtttgcttgtctgtctccccactagaccatcttcttcttagaacatagaccgtatcttttacctaaatcacatagggaaaatgtagattgaaaatttaatcctatattttttattccaaagatcctgaaatgactcttcattatctttaagtaaaatatagacttgaagataagtcatagcattacctctaaatatcccccaactatgtcactgtatactatctcttgttgctctagtcatactaaactgttcagttatttaaatttgcttctctctctctctctgtmacacacacacacacacacacaggaggcagttgtgcacagacacaaccctcttctactcccatacctgtacacatctttgtgtatgctgtgtcctttcctggctaagctcagatgtcacttagataaggatttatcatttgagcttccatagtccccaatcctgtttactgttctgtctctcttagaccatacccgtaagtgcatggactgtgtcttttatctctgtatgcttcgtgcaagataattaatcatgatgatgtccctgtatcatgaagtgaaagttaaattgctacttttaagataggaaataagataggaaagtatgtgttctaacaaaatttcccctcagaaaaagttgataatttcatttttattggattagtgaagagaattacttaaagatatcctttttattacctcgtcatagttctctacattagaatcatgctagtttttcagtaggtgtttccaaagataaagattcatttggtttatactgaagtagggtttagtgagtagccacttgagaaaactaagtaaaatctgtatatttttttcaygaatggaaaaaatcaggtggtgattaacagtctcatgaaagaggytttctgtgtcagtgatatctgttttaatacaaaattaatgggaattacaaggctttgtcttttttcctgtgttttcccttaagtcataatctttcttgttatagtcatatttgaacaaataatttctgatacaaataggtttataacttgtagcagacaataaacaggcctagcagatggtcttttacagaacacagatcttgtttcggcataaccattctgaagatatttttaagcaatgggaacatttttctcttttaaaagaagcttgccttcagttttctttgaagtgtttgtcattgttaaagccttaatcagtattttggtaagcaacaagcaactatagcaatttcatcagaattttattaaatacccttttgaaaaaaaaaactcataaacatttctgtaaaactttttgtatgaaatatgtaaaatgagtacataaaacatcaataaacatgtttaatatgcataagtatccataaataacaaatgaaattaaacatgtagtaaccatcacccaggccaagagaactttgccaccaattcagaatcccacccacctccactgctctttctcaatcagatgggctggtatgaacaattttgttatgatcagtttttacatgtgccttggtgcacacatctggggggtgtatacttagaagtagaactgtggtccttagggtatacatatcttcaaatttcctagatattgccagactattttccaaagtgattataccactttatcttacacctgtagtatgtaacagttgtggttggtattatccaccgttaaaaaatgtttccagtcatttgtgtagcagtatctcattgcaattttaatttttgtttctttgattgctaatgaaactgagcaccttttcatgtgattgttagcaatttggatttcctttttctgtgaaatatctgtttatgccttttgctcaggtttcttttgagttgtgtcttgttcaagtattcataggcaatctatgtgtatattttggacttgaactgttgataggttttatgtaacgtgaaagtcttctctcattcgtgtttgccttttcaccctctttgtcatatcttgatgatctgaaattctcagttgtcatatggcaacattcttatttatagttgccactgtttgtgagttgagtaaggaatctgtaccttttcttaggttatagagggtatattttcttgtaagtgctttataattgtgctttttacacttaggcattgatttttgtatatagtatgaagtggtggtccagttttgttcctttttttggtattctctttagatgacccagttgtcctggtcccattcattattctttgtacttacactatcatttttatcaagaatcaagcatcattatatgaggtctttataacttttatactaaaactccattaaggcagtagaaccgaaaatcacaagtcactcattcatgaatgcaaatgcaagaatcctaataaaaatattggaaagctaggccaggcacagtggctcacgcctgtaattccaatactttgggaggtcaaggtaggtgaattactttaggccaggagttcgagaccagcctgagcaacatggcgaaaccctatctctactaaaaatacaaaaattagcccagcatggttgcacatgcctgtaatcccagctacttgggaggctgaggcaggagaattgcttgaaccctggaggcggaggttgcagtgagctgagatcgtgccacagcactctagcctgggtgatagagcaagactctgtctcaaaaaaagaaaaggaaaactgagcaataaattgggaagtaaagtttattctaggaatgcaaagttggttaaatatgagaaaatcagaaaaatctattgagcgtctcaagagatgcagtataaaagtctgataaaatttagtatccattcaatgtatctatgtatttaaaactgttagtaaactagagttagaaagcagtgtcctaatatgataaagaacaggggtccccaatccccaggctgcggatgagtatctgtgggtgtcctgtgaggaattgggccacacagcaggaggtgagcagtgggtgagtgaacataatcgtctgagcgccacctcctgtcagatcagtgggggcaatacattttcacggattgcaggcgctattgtgaactgcgtatgcgagggatctaggtcgtgcattccttacaagaatctaatatctgatgatctgaggtggcagtttcatcccaaaaccatctcccacccccaggtccatggaaagattgtcttccacgaaactggcccctggtgccaaaaaggttggggactgctgataacagaatatctataaaaacaaaacctacaaccagtattgtgatgaagcattgaaagcattctctttaagttcaggaacaggacaaggatacctttcatcacctcttctatccaacaccataaaggagatcctagccaatgcactaatatgataaaaagagaagtataagaattggatgtgaaaaaacaaaactgtttttatgtttatgtatgtttatgaatacatacattagaaagaagctataaacaaattacagtaaaagtatcaagatgctgaatacgtaattaatcagagtttattattattattttttgtttgtttgtttttttgagacagggtcttagtttgtcatccaggctggagtgcagtggcaaggtcatgtctcactgcagccttgacctcccaggcccaagtgatcctcctaccttgcttctcgagtagccgggaccacaggctcacgccaccgtgcctggctagtttgtttattttttgtagagacaagttcttcctatgttgcctaggctggtcttgaactcttgggctcaagcaatcctcccgtcttggcctctcaagatgctggtattataagcatgagccaccactcctggcctattgttaatatttttaacctcctcccagacaatgcaaggacattaagtcactttaaatggaaaattcaccctggggatgaacatcccccaataaatgttggctgtgactcatgggtcagctgttttaatttcttcctccccactaccttctgaccttgatcattatctccttgccatatatttctcaggtatcttttgttttattgttttctgcaatcacttatgcaaagaataagtctccaaaaacccttaatgaccaccagaatttgaactgtcctctacaaagcttgttaataatttcttcgtagaaccctcatctaatttctcttttttacatcatttttcaaaaaccattgagtccttggttattttttcccttgtcctttctttcctctctttgattttccttttcctttctatgttaaaaacatcatgtgggccccgtgcttgttaactgagccagtcaatgagatagtgcctcctgaatattctcttagcctcctaacggtaagattacataaagtactcgagaatggggagttgctaatttctacatacattgtcacctgtgtccatagcattaaattctattgttatcataaagcctatctaagttcagttgcactcctagcatgcctactccttcagaaggactgtttgctttatatgtggggaagagagtatggcagttacccctcttgcggtaggtatgctgcaatcctacttttactcactgtagcagattagttgtcataccacctggaagaatctcttcacagccacttggggatcaatcaagccagtaatcccttctactcagtagtatgtaaagtaagtgatgtgtttccctgattgttaattctgagaatttatgccagtagtaaatgttgagagtttatgccaacagtgaatcaccaggcttttttggtgtttctctgtaaaacagtttcttttttttttactgaatactctcagaacatagtagtccccraaacttgtcctctaactgtctgcattgtctttgtgacaactcatagttttaagttcattactttcctgttgaatacttcatttttccaggtagacgtaaaagcataagaagtctttcagtgaggaaaaactctctcttgccaccatttcctctctaaaaagactgacatttattagaaactagtaacagccagagaatgggatttttcactatcttcccctctgcgtactgttccctatcagtccactagcaggttctctaaatcttgccatttcctaccgaggttaggtaggcaaacatcctaggattcaatcctctgccagttttctttttttaaattccttcctttttctgactaaaaaaattatttaggctttgtgattcatgggtctgcaagagagtcctgcacacagcaccatcctgagctaacatagtttcaagtcagacacacgtgaacctaattacccgatattaccaagagagattacccagttttaaactttattaataatttcaaaggtacaggcaatcaggggactcagaagaagtagggatcaacctggcacatagagcaaggcttcttactgtgtgaattgataacccatccaccccatttgaagaccttttctactctgggccagagattgtgtagcttatgtagggaaggaaggaccgaagcagctgcttttaatatcccaaatctcttagtctggacttcctgattccctgtattttaaaaattatttgtaaagcttgacactgggtaagatctctggttcatgtgagttagatttgacactctgatcttatgtattctttcacccacatatgtccattcacttctctcatttcttcctttttcccagaccatctaggaccagttttcttcttcttgaactaattttttaatatttccttcattgtacatttatgtcagtagccaaagagattgttgttagttggtctgaaatgtattttgcctataattctgggagatatttttctctacatatagaattctacattggcagtaatattgttgtacaggagttggtaaacctcagtccatgggccagctacctgtttttgtaagtaaagctggaacacggctgggcctttttgtttacatattgtctattgcctctttcacacagaaatagcagttgaatagttgcaacagagatcatatgtcctgcaagtctaaaatatttttacttcggcagtttaagaaaaggtttgctagttcattggtgatattctactatctatggctttcatcgttgctattttaagaagtcacctgtcagaacaattgttattccattgaagataatttgcctttgttgattttttttctctgatttttttaagtattaaagattttaaagaatttagtcttgagattcattggattacttctgtctgtggcttaatgctttttatcagttccaaaaagttctcttgatcccgggagtttgaggttacagtgagccatgatcacacaactgcaccccagcctgagtgacagagtgagattctctcttaaaaaaaaaaaaaaaaaaaaaaaaaaaggccaggcgcggtggctgaygcctgtaaacccagcactttgggaggccgaggcaggtggatcacgaggttaggagatcgagaccatcctggctaacacggtgaaaccccatatctactgaaaatacaaaaaattagctgggtgtggtggcgggcgcctgtagtcccagctactcgggaggctgaggcaggagaatggtgtaaacccgggaggtggagcttacagtgagccgagatcgcgccactgcactccagcctgggcaacaaagcaagacgccatctcaaaaaaaaaaaaaaaaattgatatgggagtgcaaatgatcaagaatagccagaaggatttttaaaaagaataaactttaaggaggtacactatcaaatttcttggctgaatttaaagctatagtaatgaagaaagtgttgtattggcataaggatacacatctaaatttgggggcagaattgaaagtccagaaataaatccacacatacatggttgtttttgacaaagatatcaaagtaattccgtaagttagtgatagttttcccaacaacattgaaactgtcactgttgatagtctgtccaacaaagttttttcaacactgtatcagtagttattgatatgggggaaaaatgaacaagatacatatgggaaaattaaatgaaaactgaaaacattttaggagaaaacataggtgaagtatttggtgtaggcaaagattccttagatatgtcaccaaaagcatgaaccataaaagaaaaaaatgataagttgttctttatcaaagttaaaaactttagctattcaaaacataccatttaaaaaattaagaaccaagccacagtatggcagaattacttactgtacataaatctgacagaatttatgtccagaatatgtaaagaactcttagaattcagtaataagaatacaactgggctaagtgtggcagctcatgcctgtaatcccagcactttgggaggttgaggtaggtggattgtttgagaccagccacaacatagagaagccccatctctacaaagaacacaaatattagccaggcatggtgtcacgcacctgtagtcccagctactcaggagtctgaggtgagaggatcacttgagcttgagagaggttgaggctacagtgagctgtcattgcaccactgcattctaacctgggcaacagagtgagaccctgtctttaaaaaaaaaaaaaaaagaaagaatacaactgacctgatgttttaaatgggcaaaagattcgaacgaaagaagacatgggaatatggcaagcaagcctagaaaaaatgcttgatcattaggaaaatgcagtttataaccacaatgaattctttctacacagtgaaaatttcgaagatcaacaatagtgattattaacaaggatgtgaagcaacaggaatgcacatgtattactgctggaaatgtcaaattgtttatatgctttgtaaaacaagttggcagtttatttaaaaagttagatatacactaccatttgatggagcaattctgcttatacacagatgtttataccagctttattcattatggtccaaagctagaagcaatccagaattacatacacaggtgaatgtataaacaaaattgtgatttatccatgtggtggaatactactcagcagtagcaaggaacaaacaaactactgatatacacaaaagcatacatgaaactaaaaaagcatcatgcttattggaggaagccaggcacaaaaagaatcagcacgattctgttagtatgaaactctgtctgtaaaatgcaactctaatatataatgaaagaaagaaaatcagtggttgcttgtggatggggagattttctgggatgggcactaatctttgggggaagaggaaatgttctatatattgattgtggtggtcaacaaagtatctgtttttcggaatttaacaaaactaccctaaaatgaatgcacygaattgtttgtaaataatacccaatgaagttaaggggtacaatttcttctttgatgcaggaaaaaaatcctctatagttacaatgtacattctgagaattgagaatttattaatcagatgtaaacttaaccagcagcttacattcacctttgtgaaaataactgttgtttcatattacagaagaaggggaaatattgctaatcttatgatcaagtgtataagaacatctaatgagtgccactggtcaaggttaatttttgatagtgataagatttcaggttttaacacttaatgttttgttgttgatgatagtgtcattgtttatagatacatgtatagctttcacaagtatttgatcctcttaatagcctgtgacgtaaatagggtcggtattattctcttttacacaggagtagcacaggctcaacgaaattacttaaaaatttggtgaagatcacatagctgacaaatgctagagaatctgggggttaaattatgggcttggggcttcaaattctctcacccctatgacagacacaacacttccctttaaaccatacttttatatgtcttatatgtctgtcttcaccactgtgttgtttgttttaaagacatgtaacttcattgacatgttattcttgataaaatttggatttcttttcaaactcagattttaaatattggttcactgtattgccatattaaccacaaacatctttgggcatgcatggagtaaccataaaataattacaatgtccaaagaacaactaagctttgattgaaatacttttttgtcccacaaaacaatacgagttgttggcaaaaaattatgtaatttaactagctttcagaatctgtttaacctactaatctaattcattataattttcagactaaataaacttgaagatactattacactaattaaaggaaagattgaagaagttcatcttcctgtagaaaaagtagatgttatcatatctgagtggatggtgagtgtttatagaaaaaactactttcactggtaaaatgaaaaaacttttttaaagtaatagttttcatgaatttaattatatttsatacatggcagaatggtgacattattttttaaatagctacattagatactataatgtgtaatttaaaaaaatagctacagtcttcttactgtagtttattctgaaatggcccttatttattggctattcataatctttaaaaagtgataaattatcttttttatcttaaaagtcctgataaattatttttctactttctaagttttagatacctaagtgtttgcctgaaagcctccagggactaataagaactcattaggactgtttcatcaaaattaacatgatattgccaccattatcatactgaatgtcctatctttctaatctgttgggccatgtaatcaatgtccattatcacataaaatagaatttattgctgttactgaaatattaaaaggaaggtatgttacatagctttataatttgctgttgaaatcttttgtcaagacagaatgtttatttttaaatatatggaaataaaattaatggaggctgggtatggtggctcacacctttaatcccagcactttgggaggctgaggcaggtggatcacctgaggtcaggagtttgagaccagcctggccaacgtgatgaaaccccatctctactaaaaatacamagattagctgggcgtagtggcaggcacctgtaatcccagccacttgggaggctgaggcaggagagtggcttgaacccaggaggttggaggttgcagtgagccaggatcacgccactgcaccccaacctgggtgacagagcgagactccacctcgaaaaaaaaaatgtatttgacagctgatttgacttactgatatgtcaatttgacagaaataaactggatagtgtttctaataaagatttttaaattattttgaaataatttttttccttaaagttctgtttggtagatatacataaaatttatcaaaaaattttgaaaacattgagttttgctttataattttttataaattttgaataaacatagttataatcctagtgaaatagatgtttcaaggaacttttggaatattcagatttaatgtagtagtgtagggagttccagtctagagctgatgacagtcacagttgttgacagttacyattttgtatgtgaaacagtatgttgattttttttttaatgctaagattggccttaaacaacctttagtcacaatatcagtattmtcacaccaaagaatttgtatcagcactctgatttctcatgaattgaaagagtagatatgaattaaaaatgtaatatttctttaaagactatgaaaagatgcttctgagaaagcacatttgaggcatatagacaagaattttaaatagtttatgctgtatattttactcttcttagaaaatgcatcttttaaattactccaaaatagactttataggcaaaccaaaagaaagacttgtccaaacttcctgttacctcagttgaacattattatatatctgattacaataactaatgggatagttcttgctctgcctagcagaattatactgctggatattgatgttctaggatttttcacttccaaatctgaaagatgatctagaattattaataggcaattgatatcttagagccagctggtttaataactgcagttagctggattgaatgaattcatgagattgtctttatgatgtgaactttattgaaagttgtactggaatccattttgtacccttctgctttcttctgtaccaaggagggctaaccctgcaggctgcctttaccaagctcctatgatggctaacttctgctgagtttggggaacccaatgggaaacactagaaacactaaatctcccaagatttaagaaagggagaagccagggcatttcttcccttcttactttatctctagtgtgttgctggcaaaagctatttcttttgtggttccacttcccaccgaacaggcatgctgaaattccagcatccactgtgcaaccccagccctgggttcttgtagcagtagcctaggaatgctagtttcttgtgggcattgtcaagtctggttgtctcactctcttgatgactgctcatatcttttatcctctgtataagtgacttttgacattaaatttcctctattttaaatagcttttgtggtttctcttttcctagtttgtgcttgtaactcagcagtccctagacttcttggcaccagggtccagtttcatggaagacagttttcccatggattgggggatggggatgggatggtttcaggataaaactgttccatctcacatcattagattctcatcaggagcatacagtctagatccttcacttgggcagttcacaatagggttcacgctcctgtgagaatctaatgccactgctgatctgacaggaggcggagctcaggtggtaatgctggcctgccactcacctcttgctgtgtagtccagttcctaacaggccacggaccagtacccatccctggcttgggggctggggacttgctctaactgaaataaagaacacctttcacttcagagcgttggtcaggtaagacctctctcttcatcaggaaggcagtcactggagtcactggagcctgagatgaaaggagccagttgtttggaagccaaggttcttcgaaaccagtaatgaaaaacaaatcagtgtattcaggaagggataactaaraacttttcttcttcctcaccacaaaggtgttacttaagcatttgtattatctcactgtctgcctttccttgttttaagtgagttgaagtctagcaactgttttaagtgctctaggtggggcattggacactaaacttacagcagttattctatggcagtcagctctggatggccttatttctctggtgaaatttgcatttaaggcttaagaaggcttgtgctaaattattttcaatcatctttgtggattggaaatatcatttatggtatcttctaaatcctagaagtccctaactttatttggtactttcattaggatttttgatttgagaagctggaaaacatcaattacataattaaacaaagggcaggtatgctttctaaactttatcctccatgtttcaggcgcattggctgaaacagtaggcaaatggtaaacaactattttaaatctgtagccacattttcatgaaccagcattttaaacttaaattgcacagactcctgtctttatttattttattttttacatacaacataataaagatgcaaaaatctagaatgaaccatagttaagcattttttttctctttttacaagtattttcaacaaggaaagacaaaaatggaatataccctccagaattgggcacagatgtttaatggatgtgtaatccggtatagcagtgtagaaatcatacagcagagatgtacatgttttcttctactgtggtccactaactattccatggcttaatctaaatatgtttctagtctgcacctgttcatgaatttttgtctttattttggaagatttttctagataagaatgtaattttaaaagctaaattattgctgttagcatgttatttaataaacaatcacttggcttgcattaacaaatttccagttctaggcttgcctttaattttatattttcatttttgtttttatttaagagaagttttctttttattttatatatttaaggtgtacaacatgatgttttgatttacacagtgagattattactgctgtcaaattaacatgtctgtcatctcacatacttacctgtctttctgtatgtaataagagcacctaaaatctattctgttaggaaatttttcatatacaatacaatattactaactgtagtcatcatgctctacattttcatttttatcagatggaatttctgtttgacaaaattgtttcagttaaatgtaaacagtttaatccctggaagatgttaatacctatgtctttgtgtatgtgtcctcattttttacattttagtctaccaatagaagttcttgttttgagagctgttctttattgcttcttatttctgcctacttaataaaactgttcaaaataagcatccctaattccgactcagtaagccaaattgactcatttggtgttgctatatttcctctatgttttcagcataactttgcaaacacatagactaagtccacgaggcttagcattagtaaatgatgacggaatgtgaattgtaaaaytgtaagagaacgttcccaaacagaaattcgctggcctcagacatttataattttatgtacaatacatgaaggcatggagatatagtatatgacagggttaagaatgttgctccagaggcaaactacctccattcttgggcatgttacctctctgtgcctcagtttccttctctataaaatgaaaataacagtattacctacttcataaggtttttttstgaggattaaatgagttaatacatgcaaatttcttagaacagtttctggcacataagatctcaataacttaggtattcagttttgaaagttatacaaacttttaagtactctgtaactcatgagcgagctactacactagctaattcaataaataacagttgaaaataatcatatacatgaaataaagaatattaattcttggaggaagaacattcttagggcttctcccttgcttaaagccctttgtaaaagcggaagactttctctttccatgtctagcatttactaattgactgtctgtggttggtatacagaagtatgaaagtaagctgatggatgtgagttattgggatttggggtattcttggtatttttcttaatgttagttgaatcaaaatgtactttatgtatatttcaagcataattctcagtttgctgccttggaaacaatttttaggcagtgctgacaatgcctaataattttagataaaatataaaattcccattccgcagtactgttttctagtactgttaagtattaacagggagatatttatagtacttgaacaatgaaagaaaagttgtggttcatattttttcatagatatgctaacatctgaatcaagaataaaatgaaagcaaagggaatagaaatgtaataggtcccttgtgtataattattttggtcttataatctatatttttgttcttgtctgtgctcttaaccacttcctagcctttcttttattcaatcttcgataagtgacaaagtattctaatcatgaatattaaaaggttaagttattcaggaacatgaatcaactgcccttacaaacatttttcaggtaatccctcagagaacacaaaatatttgttaatttttattttaaactctaaaattgtataacaacttaaaaatattttatcagtaatactgtttacttctacctgggagtaaaagtaaacccttcaaatttacagcttacatttgtaggcacataagcatttattataaatacaaattgtctcctataaactgtatattgtgtatatatgtcacattttttttgtccattcaactcttaatagacacttaggttgattctgtatcttggctattgtgaatagtgctgttataaatgtgggagtacagacatttctttgacattctgttttcctttcttttgaatatgtatacccggtagtgtgattgttggatcatataatagttctatttttagttttttrgggaacctctatactctttttcataatggctgtactaatttatattcttaccaacagygtataagaattctccttctctgcatccttgcatccttattttgtctttttgataacagccgttctaactggcatgaaataatatcacattataatttgtttgcattttcctgatggttagtaatgttgagcattttttaatatacctgytggccttttatatgtcttcttttgagagatgtctattcagtttatttgcccatttttgatcagattatttgggtttttgctgttgagctctttatatattctggatattaatctcttactggataaataatttgcaaatattttctcccattctgcagattatctctttactcttttgttttcttttctgtgcagaaactttatttacttttttagtggctttttttttctttcagatctgggaatacatatacaggtttgttatttaggtaataacttgtgccatgggggtttgttgtacaaattatttcatcacctaggtactaagcctagtacccaatagttatttttttttyactcatctcccttctcccaacctctaccctcaagtaggccccagtgtctgttgttcccttctcgtattcgtgagttctcatcatttagctcccacttataagtgagaacatgtggtatttggttttctgttgctgtattagtttgctaaagataatggcctccagctccatccatgttcccacaaaagacatgatctcattcttttttatggctgcaatagtattctatggtgtatctgtgrcaccattttctttatccactctgtcactgatggatgtttaggttgattccaattccgtatctttgttattgtgaataatgctgcaatgaacattcatgtgcatcttgctctttatggtagaatgatttttatttctctgggtatatacccagtaatggaattgttgggtcacaaggtagttctgttttgttttgttttcgttttttttaagatagggtctcactctgtctcccaggctggagtgcagtggtgcagtcttgtctcactgcaacctccaccccccaggttcaagcaattctccaacctcggcctccagagtagctgggactacagacatgtaccgccgtgctggctaatttttgtatttttggtagagatgaggtttcaccatgttggccaggctggtcttgaactgctgacttcaagtgatctgcccacctcggcttcccaaagtgctgggattataggcgtgcaccaccacacctggcctggtagttctgtttttagctctttgaggaattaccrtactgctttccacaatgtttgacctaattgacactcagacagtgtttaagtgttgccttttcgcctcaatcttgccagcaccgttattttttcactttttaataatagccattctgactggtgtgagatggtatctcattgtgattttgatgttcatttctctaatgatcagtgatattgagcttttcttcatatgcttgttggccacatgcatgtcctctttagaaaagtgtctcttcatgtcctttgcccaccttttaatggggttgtttgctttttgtataaatttgtttaaattccttatagatgctggttattagacctttgtcagatgcatagtttgcaaatattttcttgcattctaagggttgtctgtttactctgttgatggtttcttttgctgtgcagaagctctttagtttaattaaaccctatttgtcagtttttgcttttgttgcaattgcttttggcrtctttgtcatgaaatctttgcctgttcctatgtccaggatggtattgcctaggttgtctttcggggtttttatagttttgggttttacatttaagtctttagcccatcttgagttgaaaggaaggggtctaatttcagtcttctgcatatagctaggcagttatcccagcaccatttagtgaatagggagtcctttcctcattgcttgtttttgtcagctttgttgaagattagattgtgatcttcaatccgattgaaggttgtgggtgtgtggctttatttctgggtccgctgttctgttccattggtctatgtgtctgtttttgtaccagtactgtgctgtttttattactgtagccctgtggtatagtttgaagttgggaaatgtgaaacctccagttttgttctatttgcttaggattgccttggttatttggactgttttttggttccatatgaattttaaaatagtttttcctagttctgtgaagaatgtcattggtagtttgataggaataacattgaatctatacattgctttgggcagtgtgaccatttcaatgatattgatccttctactcatctgcatgggatttttttgtaaaagctatttaatttggtataatcccatttgtctgtttttgcttttgttgtttgtgcttttgagatcatctccacaaaatctttgcccagactaatgtcctgaagcgtttcccctatgttttcttctattagtttaataatctaaagccttacatttaaatatttaatccatttttagttgatatttttttaattcatttattttctgtcgcccaggctggagtgcagtggcaccatctcagctcaccgcaacctctgcctcctgggctcaagcaatccttccaccccagtatcctgaggagctgggactacaggtgtgcgccactatacccagctaatttttgtgttttcagtagagatgggrttttgccatattgcccaggatggtcttgaactcctgggcttaagccagccacccacgtcagcctcccaaagtactaggattaccgcgctcagaccatttttagttgatttttgtatatggtaggagatagggatctagtttgatttttgtttgtttgtttgtttgcatatggatatccattcttctcaacaattgaagagactgtcccttctccaataaatgtttttggtacctttgccaaaaatcggttggctgtaaatgcatggatttatttctgggttctctattcagttattttggtctatgtgtctgcttttatgccaatatcatgctgttttggttactataggttgttgacatcaggaattgtgatgcctccagctttgccgtttttgctcaggatcactttggctattcaggatcttttgtggtttcatgcaagttttagggttgtttatttctacgaagaatgtcattggtattttgttacactgaatctgtaaatcactttggccagtatggttatttcaacagtattaattcttccaattcataagcatgggatcactttccatttttggtgtgttcccttcaatttctttcatcagtattttgtagttttcattgtagagatctttcaactctttgtttaaagttattcctaagtattttattttactgtagttatataaatgggattgctttcttgatttctttattacttcccctgggtatagaaatgctactgatttttgaatattgattttgtatcattcagctttattgaatgtgtttgtcagttctaagaggtttttagattttctgtataagatcatgtcgtcttcaaacaggaacaatttgtctcccttctttccaatttggatgtcctttatttctttctcttgcctgattgctctggctagtattatgttgaataaaagtggtgaaagtggacatcctcatcttattccatatctaagaggaaatggtttgaacttgtccccattcagtatgttgttggttgtgggtttgtcattgatggcctttattgtgttaggtacgttccttctatgcctaacttgttgagagtatttatcatgaagggatgttgaattttatcagatgcttctctgtgtcttttgagatgatcatatggcttttgtccttcattttgttgaagtatcatgtttattgacttgtgtacattttgtcatccttgcatatctgggatgaatcccacttgatcatggcaagtgatcttctgatgtgccacaagatttagtttgcttgtattttgttaaggacttttacatctgtgttcatctgggatattggcctgcagtttgtttttttttttaatagtgtctttaactgattttgttatctatataatgctaacctcatagaatgagtttggaagaaatcccccctcttgattttctggaagagtttgagagtaatcggtgttagttctttaagggtttggtacaatttagcggtgaaagcatcgggtcctgaatttttctttgatagactttttattacagattcaatctatttacttgtgttctgttcagattttctattcctggttcaatcttggtaggttgtatgtgtccaggaatgtatccatttcctctaggttttccaatttgttagcatatagttgttcatcatagtctctaataaacatttataattctatggtatctattttaatgtctctttgtttctgattttatttattttggtgttttctctttttttttcttggttagtctagctaatggtgtgtcaattttgcttatcttttttaaaaaccaggttttcttattgatcttttgtattttttaagtctcaattttgttcatttctgctctgacctttgttatttctttccttctactttgcttttctagttgtttgagatgcatcattaggttttgtatttgaaatcattcaacttttttgatgtagacatctggtggagcagttgccttttccagacttcctagtgttgcaaagggaaagattagtgttccagttgggaatggtgtggtgagtaagtttccagataggtgcagtggtatagtctctttgcagcttcttgacctgtgttcaacatcagcaataatatgagtgactcagtggtataggctgtagaagtttgtggcagtggtggcagcagcatagtttttttttttgttatttttgagacggagtctcgctctgttgcccaggctggagtgcagtggtgcgatctcggctcaatgcaagctccgcctccctggttcatgccattctcctgcctcagcctcccgagtggctgggactacaagcactcgccaccatgcccggctaattttttgcatttttagtagagacagggtttcaccatgttagccaggatggtctcaatctcctgacctcgtgatccrcccgcctcggcctcccaaagtgctgggattacaggcgtgagccactgcgcccggccggcagcagcatagtttttaaggtactcagttgcaacagtttgggagatcctcatgttttcatttttcctacaataggaagacttagctgaccctgctgttaggtctgacatggtctacaagcagcagcagtggtgcttggagcagcagtggggccacagtactgcatcagaatcccatgaaccttttgtgttacctgggtctttgggtgcagattcaccctctgtggcagggttggatgtaagtttcccacaagaactaggatctgtgacaatggaggcaccctccagcagctcggaaccagagggctcagttgtaactgtggttttactcaagccacagcactggcctgaccctggggaagcagggatgttctggaggtttgggctgggggagcagggtacactgtacagtagtgactttagacactgggatggtgggtgttggctgtatcccagactctgtgaggctgggtgcagcagcagcaagtaccctagaatggtggagctcagctgtcatttgggccctaagggtggcaggtggcctaaaggcacagtgatgactctacttcccaaggaaaggggtgtctctgcaactcggactcgtgggggttagtctagcttcaggcaagcagggtactagagtcattgtgtagggtgggrtgtctcagctcagccactgctcttgtttccctgggatgcagcatactgcatcagctcagccctgggatgcacagatgcttagcttagccaggtcactgatttcccagagggtgataatccacttcascatagacctgtggggcattactgttctgggcagcccaggttccatttctcatgatactgggtgctacttcagcttaccaaatggggtcgtggtttctctgggcagccaaggcaccatttcctgggatgcagggcactgcttcaaccctgatggcagaggggtgttactgctctgagtggccccagtactcttttcccaggaggcagcatactgctgcagctccagcttgagggggtgggagaggggtaggtggagtgcctccacctctgctttgaccctacgtgtaagggtgtaacagctgctcacaactctgcctggggaagttggaccaccagactggggtggttcagcagcttagccttagagatgaaggggagccatggctactcacccctgaagcaaggtacacttcagccatagtttcaattccaagatggcagtagccacacaggcactgggggcaggacagagtgtcattttcccttgggagagcacagctatttggaccccaggcagctccttcagctggcatattgcttgtcaggactgcaggtgaccccagtggtgaggtctgtagatgtccaatgtgttgatggaggttgctgggatcctcttgcttacctccttgccatagggagaagttctcctgattcccacttgatcctggctgggatttggggtggtaggagactggtgttccctttcattctcaatgtggccatcctgagtttttgtgctcaccagcgtttctgttactccactgatgtctccagagctctccctgggttattttcattaacatagttgtatatttcattgttcttgctgtctttgtgaaaggggcaagtgctagtggcttctagtcagcccttgctgatatcactctccaaagccaccaattttaatgtacattgcagtttcagacattgtagtattgggggaggtgtccattttagaactgatgaaatactgtaagtaagtggagataatattaccatgtttgaagtttggaagacattgtaaagatgtcaattctcttcatattaatctgtagatttaatgtaatccagcaaaaatctcaaccatgtttatgtggagtttgaaaaagcagctttttaggtaaatgaaaaagaagcccaaaagcagcctgtatactcttatgagaataaggtgggaggactttgtgtactagatatcaagctataaagtatactacagcaattaaaacagtgttttacttgtgcaaagactgacaaacagacctgtgtaacccatactcataaggtcacttgatttgtggtaaaggtggtactacagagtagtgaggaaaggatgatgctgaaacaactgaatgtccttactggggaaaataaaaagaagtaagatttctacttcatagaaaacgaagaaatcagttccaagtggagtaaagttctaaatggaaaaagagctttagaagataataaaaggggatatatttatgactggatagagaaaatttcttagtcaaaacccccaaaatactaatgttaagagaaaagatagtggctcactcttgtaatcccagcagtttgattggctgaggcaggaggatggcttaagcccagaagttcaagactgcatgagctatgattgcaccactgccctccagcctgggcaacagagcgagatgctgactcttaaaaagaggccgggtgtggtggctcacgcctgtaatcccagcactttgggaggccaaggcgggcgaatcacgaggtcaggagattgagaccatcctggctaacacggtgaaaccccrtctctactaaaaatacaaaaaaaaaaaaaaaaaaaaagagaaaataaattggactggactacatcaaaattaagaaattctgtcataaaaagacacatttaagagcatgaaaagcaaaaacagttgttctggatgtcttttatgtacaatgatgatgaataaattgatatgcttttatcaaaatggttagtattctactatatattaaaatagtaatattaatttttcttgaattttacaaagaaaaaatttgaaattatattgaagcatccactgagtacttactgtgtcccaagcactggttactgttgtgtttggcagttctttttactaatcctttattggatatgtggtttgcaaatattttctcccactctgtggcaggtcctttcgtccttttaacagagtctttcatagagcaaaagtttttaatattgataaagtctaatttatcaattatttttatagatcatgcctttggtatcaagtctaaaatttcttaatctgtagtttcacctctccctttttttttcttgtctcttgtgttcctttaacaaaccctagtagtcctcaatataacatctgaattacaggttgatatattgtaataatacacagaaaatatcaaataagtatgtttatgattcagattttactttctggtactagaagatattttatggtcgttttatactgcctaaacttggaatcaaagaatcctggtctttcattggaaaatgatatgtagagatcatcatctatgttcctacagaccagatgttactaactttttatttatttatttatttatttatttatttatttatttatttatttatatattttgagatggagtctcgctctttcgcccaggctggagtgcagtggcgcaatctcggctcactgcaagctccgcctcccgggttcacgccattctcctgcctcagcttcctgagtagctgggactataggcacccgccaccatgcccagctaattttttttgtatttttagtagagacggggtttcaccatgttagccaggatggtctcgatctcctgacctcgtgatccaccagcctcggcctcctaaagtgctgggattacaggcttgmgccaccgcgcccagcctgtaattaactttttaaatataaaaagtcacaaatctacactcatattttccgtgtaagattatggaatttttacttgaagtctttgattttatacttgcgtctctttacgtctgtgcagaaaaccttggttcctaagatgataattgctttatcatataacctacctacaatagtttcaggtgtttttttttttttttttttgagatggagttttgctttttttactcaggctagagtgaaatggcgtgatctcgtctcactgtaacctctgccccccaggttccagtgattctcctgcctcagcctccctagtagctgagattacaagtgcctgccaccacgcccggctaatttttgtatttttagtagagacggggtttcgccatgttggcggggctggtcttgaactcctgacctcaggtgatctgcctgcctcagcctcccaaagggctgggattacaggcgtgggccactgtgcccggctagtttcagaacttaaataccaactttactactatacaataagacttctaaatgcagcttaaattttgtttatattttcttatagaatgtatctcataagaaatgtacagtcaaaatattgtttttttttttaaagtcacttgtagtcactattttcacctattctgttaccaacttgacatacaaccagatttcagtgttttctttttttcaattttggggaggattgcttctttttcccttgtttagtttaattttgtgttttagttatgcaaaaaattactaattttttagtaatttttatgtacattttaagataacaggacattctgtttcttcttctgttatcttcctttgtggatagatgaccattttctttttatttttggggttattttgaaaatattagatatgtatatattcacccttatgcaaaagttagcatattctagatattgttctatactttgcttttattcaattaaaattctttctcagaaatcacttcattattctatagagatatttctcattcctttttatggctgtgcacacatgcacaccaactttcctagacaggtatttgattaattctgcacacccccatgacctggactaatattcatgtatatttcaaatataaggtttttattcttgtgtagaataaattgtatagacaattacattctacgtaattaatgctcatttgaattttacccattcttttgctattacaaataatattgtattgaatattcttgtatatgtgtaatgtcattttatattgctagaggtgagattgatatatcaaagggttaatgagggctgggcatgatggcttatacctgtaatcccagcactttgggaggccaaggcaggaagattgcttgaggccagttctggagggatggagaaagggaaggagagggcaacgttactagttgttgccaaattctcctcaatgctgtgtaccatttgactttcttaccaacaatggaatgagaatacccatttttcctcagtcttaccaaagagtgtgttgaagggtcatttttaaattattgactttaggtttttcctgccacccaggcattgtaaatcagggttgtatgtttggggcctgtcttatgcatattggagacggggtggagttagggaggaagtatgtgtttgactgctcaacaccaaggttctaaactgaattggggaaatgggtgacagcagatgagactgtaaattcacatttgctctgtagatatatttgtttgtcccagctctgttatttagggcagtttcttcttagagttctcactttggttgaactttgggctttgtcwcctatttcctccatgttcgttgactacatggagaattacaagaagccaaactatcaatgacacataataacctaatgttatgcacaattatgaagtattgttctttgtccctgataatgtttttaataattgtaatagatattcgttgagagtggaatatccagttaccattaatgaatttttttcacccaccatgggggattgggaatattgttttagaaactgtttttgtgggtctggaataagacccacacgtgccttgggaaagatttttagagattcactttttcctttgatagacttgcttattgggcggttttctgcagtctgaggaatagggccaatttgactgtcagtcttttgttgattaagtgagagtgccatccagtgggagaaaaagctaatacaagttttttaaactttagaatatgcagaggaaattatttcttgtgctaagttatgttctccagaagtccacaatactaaaaagttgggaactgtatgttggaaggtgagagaagtggaagaaagtagtcttgcagaacagtagcacgcatataatagggacctaataagtagccgttattaccatgattcttcttcttgcgtggaagttggtgatcaagttaaataataggtaaattaggagcttctctgacagatatttgtgattaatacatgtaaaattctattgtcattttttgactatgtgatatacagatattataaattttatccttttttgtctttaaccctattactcaggacccacccctggtccccaaaaaaatgttaccagtttctagtatatctgtcttaaaatattacactctattataaacatgtatgtatatttcttggcatactcattcatttaacaaatagtgtggctactatgtacctggcactcttctaggcgggataaagcagtgaacctcatgttcagtgtaaggtatgcatattctacatattgttctgtaccttgcttttttcgtcaataagtttccctctaatgactgttacagctgcatcccacaaatttattcaattcaaaatacacccttgtgatttctgctttggtccatggattatttagaagcatgtttaatttctaagtgttaagaaattttaaaaatgtctttctgttattaatttctaatttaatttggttgtgataagagaacatgctctatatgctatcattcctttaaatttgttcagacttgctttatggcccagcatgtggtctctctcattgaatgttccacattgatttagaatgaagtacctactctgttattgttggagtgttacgtaattaccatttgagtcaagttgttcaggtcttttaaatccttatttattttgtctattaattctgttaattactgaaagaagaagaatgaaatttctacctatagttcagggttgtctctttctcttttcagttctgtcaggttttgcttcaggtatttttatatggttattaggtgcatacacattaggttattatgtgtcattgatagtttggcttctttatcattatgaagtattgttctttgtccctgataatgtttttaataattgtaattttcttatggttaatgtttaaatgttatgggttttcccaccctttttctttaaatataaacataggttaaaagtggatttcttctatatagcactttcttgacttttccttttctaaacctctcttacaatctcttcctataatcttaattttttwaaaaaaatcagtttcactttttctttgcaaaatgtagtatgaaaaactattgtctttttagcttgtgattatttgcctttttgttttcttttttaaaattttatgtgcaaatagtgtataacaatgatgtaaaatttgcaagatatgaaagagtttatattgaagagttagtctccttcccttcctatacccctactattatattccatacacagaggcaatcattttgtctaattgtgtactgttccacacatgctataaccatttataagcagatatgaatgtgttctttttgctttcacccacgttattgtatattatatatgctagttatataaatctttgtataacctttttagttgtgaaatgtaccatacacagaaaattgcataaacttacaggtacagtaataacgaatagttatataatgaacacctgtgtgatcatcagccaggtgaaaatatagaaagaagacatccaaatatcatttctcagttagaactccgtaccccagaggtaaccactctcctgacctttatgataatcatttccttgcctttctttttgctgttaccacttatacttacatccctaaacagtgtagtttatatttacctgtttttgaaatttatatgaatggagcaaaacatacctttttctttttaaaatgtgtttttgctttcttcactcagtcatgttcataacattcatttatattgcctataaggataatttattttctatagatgtcgttgtatgaatgtaccacaagaaaacacatcataggaaaaggttttttaaattttactgttggtgggcactggatcatttccagtttattacgcaaataatagtgctgtagtgtgcttgtacgtgtgtgctcttacacttcagcactcatgtctgggtatacaattaggagtagagttgctagagcacagggtgtgctgctcttacatgttaattccaaagtactgtacttttccaaagtactgcagtaaaattttatttcatacctccatagacttctcaaccctgggtattgtgtgactgctaatctcgtagtcatgtagtagtttcccattgtgtttgaattactaatgaagtaatatattttttgtcttatgaagtaattgtatataattattttgcccatttttcttttgggttgcatactctttttttttttaacaattagtattcttcattggtgatggaaaatatacaaacgtgtatatgtgtgtggctggccaatatcttttcagactctgtgacttcattgtttttatgagcagaggttctgggttttaacatagtcaaatgtattggtctttatggtcagacttttttcccacaggaacatgaaaatattctccataagctctatacctttcccttttacatttaggtctttactccactcatacagttgtgggaatacaaattgtcatagtctttctgtgggcagtttgatgatacatatcaaaattttgaatgtgcctatcctttaatccaagaattctactttaagaaatttatcttggccaaatacattaaacattgtacaaagatgtctatgtgtatatatacagatgccaacacaacattttcctacccattctatggcaaataagtgcaaagggtaaaggtatccctgttgagtgatatcatcagccgcctgtattttgccaagtgcctaacagtgtaatataatctttatcagtcactgtggagctgtaaggaaagtatcttacccaaaaggattttatataattactttgaaaactctcatgtaatttcattatcacatttatgataaattaggtggttagcattagcacattttaagatggaagggtcaagtgatagactggggaatcattgaaaaaactttgcagtaaaagtgtttaatatctaaggctattataacagtgaaataaatagagattgcattgcattctgtaagaccttaagtttggtgctttttttttaagcagagaacacagtagattaggaaagaatgcttatttatttgcattttggatacctctagaacagtggttttcartggggtggaagaggggacagtttcacactcctgggattatttgagctgtgggcaatctctggaaacattttagattgttagaatttgggactgtgggttgggtggggacaatggtgccggtgagtagagcccaggaatgctgctaaacatccttcaatggacaggaaagcccctacaaatttatctggcccaaaatgtcattagtgtcaatatcgagaaaccctgctttagaatgattgtttctatgcgttgataataagttagcctctaatttgggtcatattataaaggtacttgacctggtatggggcataaaggattttcttggagaggtgacattatgacagtatactttgttacatgaatatgtcatagaagacatcataatcaacctgcatttaactaattcaccaaatttgtgatgttctgcattctttttacgtaacactttgctaggttcctgtggctctctctaaacacgtaaagccaccttcagcttgctgccactgttctgcttctgtcagttgcgttgtttaccaagatcttattgtgtttgtttgcctgcttatttatgtaaaatcagttaaatatgaacacaaactattgacaagattatataaaggatatagttggtttttttctatgcaaacaaaagtgactgctttggaaacactcaggaagaagaaaacactaaaaaatgctatggaatggagcaagtaaaattgttttactcacaaacagttgtaaattgtttgtaaacaaaktgttttactccattccacaattttttttagtgttttctccttcctgagttgtctcctcctagtttgaagagcccgagtaggagggtggaaatcgtagaattcaaggaggattctctacttggcaagtgctcatagattttttttttcttctatttaaagtaaccaaaactggaaattacctaaaacctatgaatktgttttagatagggaagatgatgaggattccagtcagtggatatatcctcaaagaatgctggcaaacgaatctgtatgtttttacttgaaatgtcttgtttccaattaacaactgactgccagctccaatcacatcaaaaaattctgtctacagtgaatgttacagaatttgagagtaatactggtaaaaatgttatcaactacttattatgattcagagatatactacatagaaattatgattatattatataggcttgtgtatttgttgcaggtaatctttaagtatttcagattattgagtctttgtcatcatccttcagattaactcttccattatatttgtaactctaccttgtcttaccttttttttaatagttaaattttgcctagagatgtatcagtaattcagttatttgaactaaaaaaagttagaaaggcaccttatactgaaggtatcaaaagtttcatttatcactaatgtatctaatccaagaagatatgaacagccattttaaagacaagattcccacttcaatgaatgaagttaatattctagtccctgatttaattccatatgttcctttatagtaatcattaaagtataaatgcagtatttaattttttaaaagtagatgtcactgttggaagaagaatgcccatgagcatcatgggagaaaatatcaggcgtaattctccttccagatggcacccctacaggtgaggcagcagcctgtgaaattacagtctgaattacactgcagatgagcggggcatttggaccagagccttctgatatcagtaataaatgacttggttcagaaccaaggacaattcccaggaatttaaaggctgttgtatcacatagggagcctatcgtaaaatgaagtttagcaaagtggaaagttgagagaaaggacaatgaccattagcaatacgtatgtgaatcttttcatctgctaatatttttaactggatattttatctcatgaatgtcttattagttctatatatatgctagtatttgcattgatttttccaaactaatattttcacaatgaatagtggctaagggccagttgccaactgagatattactctgaaatgattgcacacctgttgtaaattctaatcttgtttaatatggtctatggaaaatttttcatttttgcaatgcttgaatccttaacaaatgtagtataatacacatactaaatcttattttcaattagacaaatcaatttaagaggcaacataaaagggtgattcagaacttgtatagtgagatcaaggttcgaattctgtctcattcactccccatttatgtgaccgaactattattttagatcgcaacttacttaacataaataaattaaattggaataacaataaatggtgctttggggaagaattaaatgaaataatttttatagaggcatcacaatgaattttaacgattatcaccaccattatttgtcagttttaattttagaaaacaaaatatcattttaaaataacattttaatttctaccacaaaaataaaaagcagtttcattttaacaaatataatattacacatagtattaataacttttatttattcattttaaagttacatattgagttcctactatgtaccagacacattttcagccttcaggaatatagcttcaaacaatatgacaaagtccttgatcttggagctgatattttagtaaggagacaaaataaaaacaaaaataaatagtattttcattcataagtgctatgatgaaatacaaagcaggataaagaaatggagcttgatgaaagaaaaagaaaggatattttatgtaggaacatcagagaaattctttgtgataaggtaacagctgagctgaaagatagaatactagaaaacaatttgacaatgacaaatcaatacaaacttttttgggcctttgtccaaaaaggattggaatgtagtgaatacttaatttgtactaaagtgttaattttatttattttattttcagttttgaaacacagcagtcttgcagatagggaccatttttttcaccaaatctattatgttttaccagccaatcttttcttcgtaagatagatgccttccatttaataattccttggcataaattataattcactataagcaacagttgaatgcctatttataagcatttgtgtgtgaaatctgcgtgaatatgtcagattggtaaagatttcttagttgaatcccataagtcccttgttctttgaatacatagataatattaatggggaactaacttgtaagaattttacatattactgaagtactctatccagaaaaacatgtttctgtcaaatccttaattttcctaaygtaacatattgataaacaagctttgttcctaagcctctgtttaataggcagttatttttgtatcaatgaatcagtgagctggggggaataggtcaataccgacgtagagttgccggcaattcagttcagttcctttataagtgattcaagcatgagagctgtattttctataaattaaaattgctgttaatctcttgtgaagattatccattctgggtttgcaggtttttcttgttctagagaaacctttaaaatgtttttttaatgtggttaaagaatattatacttaccccactgatcatttatttgtgaacaaaacaaatgagtggatgagaacagttttgatatagaatgctaaagtaaaggtaaaattaatgttggttcaccctgagcaataagatgtactatgtgctgagcacttggctttccctgctgcatagggctgttggggggttggaccctagaaggagaaagactgactgaaactgatagtgatttctcagtcatgattatttgtcatttgtataataaactgtgaagcacagtattggaatgtagcgtatttgtgacaccagtagtggcaaattcttttttcatttgtactgtattatttaccctttcttggtagaggattcattatcatactctaaaatcggtagtacaccaggatcatgtttcatgaattttatttccatgaacactagttctgcaaggtgttgatagatgttaaatagaaaaaaaaaaggtctgtagtcagaaagtgggtaatacttggttaaaatatgttcagcagttctctttaccatgagaactactcagaacttttagtgtgctcatgcacattatgaatctctaataggaggatatggcagctggcgtttcttaaacctttttgactaaggatccctccactttcttttttgtttttttttttaataccaaaaagaaagtcactagacaggaaattatttgggaagtggttttctagactagagtttctcaaccttagtgctattgacattttgggccaggccattctttcttgtaagaagctgtcctgtgcattgaaggatgtttaccaacataccttggctctacacagtagatgccagtagcatctcgttcatcccccacccccagttgcaacaatcaaaaattactcagacattgccacgtgttccccagcaggcaaaatcaagtggagaaccactgctctagatggatattgcatcattccagggagttatagggcttgttaataatgtctatccaaacattttttaatgaggaagaaagagtaktctggaaagtagaatcatagataaagaaaatgcagtatattttaccacaataaactttctgggttcactttataagctggcctgattttccaataacttactgcaaaaaaaagtttcagattttgcagaatattattacatctgtggcagaaaaaaaaatattctgtaattaaaagagtagcaccgatgtttaaattgacctgcttatgagagtattgcacatttctaaactctttktttcccctttttttatgcagggctattttcttctgtttgagtctatgttagattctgtcctttatgcaaagaacaaatacttggcaaaaggaggctcgggtgagtataaaattctggttttaataatctaattttagtctagcagaaccagatgaacctttggatttcaaataaactatgcatggctgaggaagttcccgatagggttgaaagatgtttgcattacaagaagctttaagacatttgtttactatattgttgaaagtagaatattatataagacatgggggactccaaggtaatggtattctcaagaatgcttttattaaaaggtccttttaataaatatctaaagactaggttttggaagctttttgatattcaaactcaaatctaacaaactcctttttatttttaatcctcatgtcatttagttcccttttttcccaatggcatatttcattctaagttggaaattattcacgacttcactaaatctgtaaacccgacttctctgtgattttctgagaacatttcaagtagtgactggtttctaatgagttttaaaagtgccacataaccaatccacatataaagggatcctaataaatttggaaggctttcttttcatgtctctggaaaacatttaatcatattaactctgcatactcagagtgagattctgtttttacagaccatctgctgtgagcaattatatacatacaaaataattgtctttcaggacagggattgtgtttgtttagctttaactcttaaatgagctccacagcttctaggatgtagatggagcatcatccatgtttattgaattgaatcatttaaagaatcattaaaactgaattgaatggcatgttcctccttcacttacctccctgcatcttaacctttctcaaagcttcagaatcagtaaatggtttccatggtcagaatacagttggtaaaactgtcacatgaaaggggcaggcatttcaaactagtgatgcaaaggacttgaccatagttatgcctcctaccatccatgttctatgaaattactttggcagttttggtacagttaaaaatcaggccggctgggtgcagtggctcacgcttgtaatcccagcactctgagaggccatggcaggcagatcacctgaggtcaggagttcaagaccagcctgaccaatatagtgaaaccccgtctttactaaaaaaaaaaaaaaaaaaaaaatccaaaaattagctgggcttggtggcaggtgcctatagtcccgacaggagaattgcttgaacccgggaggcagaggttgcagtgagaggagatcctgccactgcactccagcctgggtgacagagcgagactccatctcagaaaaaaaaaaaaaaatcagtaaggccaaaacataaatacagagaaaattctccagaacaagagagttctttttataatggcatttaaatggattgcctttctttttcaaaatgtgcccattttatcactttattttctgcaaccatttcaagatatgttcccaatctctgtcatgaacctggctagaatttttagatatattttaccctgcagcaattggctgcaactttctatgattgcagtggctttgtttttttaatgactactccaggttgaatatcccttatctaaaatggttgggacctgcagtgtttcagattttgtgttttaggggggtttcggagtacagtctttgcattatacttactggttgagcatgcttatctgaaaatcggacatctgaaatgtcgcagtgagcatttcctttgggttcatgtcagtgcttaaaaagttttagaacatggagcatttcagattttcagattagggatacataaactgtaacatttaatgacttaaaaacaacattatayatcatttgttgaccatctactggctgccaaacaatatactctaccttcatttatgttactagacataatcctcacaagagccctttgagattttacagtctcctaaaagtgtcctggatgacacatattaaatggctaaaccatgattttttttaaactcacatctgccagcctscagtattcatgttctttttactaagccttgttttcctactaaaatgtattttttaaatgtgattattgccttgacgttctagggaagatccaagtaactgtttccagacctgcctgacttgatcttattgaggaactgacagcaacttaatacatttaaattgaattctcactgaaattcattaagaacttacagcaatgtgaacaatggcagagctatttcttatcatcagagggataaagtggaggttcatatatctagctctttctatacttttatatagctaatattagtattaagataatacaggggtatatttaagagaggtcagcatttaactccttaagcagtgctgttgaatcttatttgttaacagaatcaagagaaagaaagttcagaaaagagtaacaaaaaatagtctatttgtgtttttgagtatgtcttgatgcgtatcaccagtcatttagatgctcattgttttatcacaaagcaaagttttcctttctgtttttctgaaggaaagatttaccaagtaattagtagtaaaaaggtgatagaaagaatgaatgcagtatgagagagggaaaatattgaaggcccatacaaacgtgatgggaccacaatttatttttacatgagtttaagttcaatttatgtctcaccatacatattatggtgagcagtaaaggctttataaagcacaggcaataactgggatgttcatctaccccattatcaatcaagcaattccactgtgttttagagttatatatttactatcttacttctaagaaaactaattttgtaaagttcatgaaagcaggtttactagcaacgatttctactatttctagctaatatttactaagcactaattgtgtatcaggaattgtaatgttttacatgcagccaacaagagatgaggaggaaaaataggaaaatattggttatgaccaatgggtgtttttacaactacgattaagactaaaataaatgtatattttaggagacaacatagaatataaatgttttatgtgctaaccgtgtcaaatactccatctcacaaaaattggaaagggaatgcagacagcaggtagaagtgttcacattttaattgctttatctttaataatagaaacttaaagaatattatttaaagctgatggatcaagtagtagaattattaagtacatttagcactacgaagctaacattaaattgagtgatgaggttggtggtggtagatcctgtctatgtctcttgactatggtggtgattgcataactgtgtgactttatcaaagcacatgcaaatatataccaaaaagagtgagttttgctgcatataaattatacttcagaaaagagacttttaaaatcagctgaagtagcaattcccaccttcttcgggtcaaatgaattatgagataatttgattcctaatttttctgaaaaatagaagggtgcaggatggggggtagcagaaggaatactgctaccaaatattaaaacacattataaagccttaataattaaaacaatatattattggttcttgagagatgcgttgaagagagtggtataggcctgactatacatggcatctcatataattgaagaaatgatatactgtagcaaattctattgagacaattgtgtaaaaaaaaaaagtaaagtttaatccacacaataaattgtacactgtgaatttcagataatcaaagattaaatgcaagataagtcaaatgctaaaaatactaaaaggaaacataggtttataaacttggaggaagggagtctttctaagtaagaactttaattcagaaaccctgaaagaaacactgataaatctaattgcatctatataaatttctaaatggcagaatatgctataagcaaagtcacaagagaaactacatactgaaaataatttttcaatttctgtcacaacagaaagctaatctctcccacatataggtagattatataaataaatagacgacaaacccaatagaaaattggacaaataattgaacggtggcttacaaagaaggaaatacagatgactcttaaacatgtgctcagtctctgtcgtactaagaaaaatgtcttaagaaatctttgctttactcaaggtcacacagaattttcctttgtttcttggagtttcagtttttacatttatgtctatgatttatttctaattaatttttgtgtatagtgtgagataaggttagatattaatattttctagcacccttaattgaaatgctgttctttcccatgaattgcttggcatatcttgaaaattaattggccatattcatgtgagtctatttttgtgttcttttcatttgatctttaaggctgtcctttcaccagtaacatactgtcttaattactgtaactttatactgagtcttggtcaggtaaggaaaatctccccattttgatctttttaaaaattgctttgatagtttggtcatgtggcaggggggagtttaaaataaatgttagaatctggctatttctgctttaaaaaaaagactgctagaattatgaagggattggattgaatgaatttatcaatttggaattggataaatttggaattggaatgatcagcattttaatattgagttttacagttcatgactataatgtatcttttcatttttaagttgtcttttttatttttattttttaatggagtctgtccctgtcacccaggctggagtgcagtggcacgatcttggctcactgcaacctttgccttctgggtgtaagcaattctcctgcctcagcctctcgactagctggaattagaggcgccctgccaccacgtccagctaattctttgtatttttagtagaagtggggtttcagcatggtggccaggctggtcttgatctcttgaccttgcttgcttgctttcctttttagtgtttttgttttgtttttgccttgtcatctcattcctttgctcagagcaaaataagcttaaatgttaccattttccttactttgtcctgaaattttatttatctccactcttttcaaccccctttctccttccttctcttccaacaagtaccgtttaccttaggaacctggggttcctctttccgtttcttccatttgaaaagcattaaaatgtggcatcatgcataatggaaagcatatggatttcacaattagaccttaagttgaatctctgctgtgtcagctgactagttatctggttagctgaagaagaccaggtatttatttgggcaagttactttctgcccaagttactctctgaatttaagtttaatttataacatgaagattataatccaactttgtaaaattattcaaaagtctaaatgaggtgcttgacacaaagtagttgctcaataaatgttaattcccagtcagagttacaactggtgaacatgagattagcagtaggtttatactttataaaagttatgaaatgaatttaagcattgtggtattaacacttaccttttatacagcacttcacattttctacacttttacatagattatctcaatataatcagccactggcattggttcatagtgcttaaaggattcctttagtattttcataactgtctacttcctcatcttcagatctgcatttttcacatttattagtttgagtttgttcagtaatagagcagtagtgtcattttttatttttcagcatataatttttcaaagcatattacagctatatgttagccttagctaaacgttagtgggtcttgtcattatttataaatgaatgatggggaaatgagtccaatttccaaataaatattactttttaaagatacctttattatataaactagaaattaatttttaaagctcatttaattcccatttggtgactttctagtacattttcttttatgcatatcaagcatttttgctaccattgttatttcactaaaatcttcatattgttcatatatatcatgaaaaaagtggtttattttgacttatttactatctcctttgttttaaatctttttactctgtggttatttatacaaacagtgatacaaaattcctagtgtttactagaaattgtttctttatgcatctctatcttatcctttagtgtccaaaagtttatgaggcatttctaagggataaaggatttcccatctttatctattcaccatgtgagccattctagtgacaaatgaattctgggcagtgaatcgagaaggacacagatgtcaaagccatgaatttataaatggtctgttaagagcatgcttttgtccaatcagcgctttgttaatttcacctacaacaagaaataattattcaattatagcttctatctgacaaaaatcaaatgacaaatgtgtcagaatgcaaaggtaaagggtcaggattctggcaggtggtccaagattttagccagctgtgaggaggtggttatagaaccaaattgacctataacactgattacatatccttatgcatattcatagatcttactaaccgaaagattaaaaataattttatttgcaaattctagcaatataaaaactgtgcttttctgtatttttgtgaaagacaaataatttgaaaaatacacaacacccaaaaataaaatcatgttcttctttagtttctcttctaattaccaacaatttcaaaattgttttattacttttagtaagttacaattttttcttataaaaaagttacctttagttttatggtgtcactaatatattacttaatatagagccagagataagtaaattttttcagtaaaaggccatatagtaaatttttttcagttttataggccatatagcctctgtcccaactattcaactctgccactgtagtgtagtgtggccatagacaacatgtaaacaaatgaatgtggtagtgttacagctaaactttatatattaatacaaaaactggcagcaggctggatttgactatgggccatagtctgctgaccctgatagagagactgatggcattttaaaacttcagcaagattttaaaagatattctaaaatagcagaactgtatcaactatgttaagtatcttgaatgtctgtgtactgcacaactccagaggatattcagttcccattaactatatagtgtgaacggcactccctgaagtaggaccatatggtggccctgataataacccccctccatttctgctcatttatatcaaggttatctgtatctagcctgctgcctgttttgtagataaagttttattggaacacagccatgctcatttgtttatatattgtccatgctgctttcacaccaatagcagaaagcagtagtttcaacaaaagtcagttttgtccacaaaacctaaactggtaatttcacaaaaaatgtttgctgatcacctgactatacccttattatgttcctctttaatgatgaaacgacagggcataatgtgggaaagcttctgtaattattcagtccaacaaaggatgtatcagaaagttagccacatacctaaagctgcttctgaattcttatttttttattcagtgtttctcatcctaaggatstggttcaacaaactaaatacacttccttatagctgatcctcttactgagttaacattttcaataacaaatcagttactttgaagaatttgtatcaatcaagaatttaaacacaatccagaggctttacctgtttgtggaggaagggcagagtttgcatggcaatggaccgtggtctggtgcagctggcatacatccctcacatgcctatcagggaagacttgagaaacttcttatcagtgacttagtactacgtagttttttctgagtatctcacragttaggtttggaagcaattgcgttggtgccagtaaatcttatcgtgggctttatttggagaataatttagtgctgctgtcattgaataataaaattgctaaggctgtggaaataaacgttaggaggaaggagagagtaatttttctattgtttacacctgaaagctagttaatactcatggtttttgtttgtttgtttttgtttttgctgcatttctttggtacatttatacttgttycattttgctgatatgggaacatgtgatttatatttttaattcatgagtaccctaaaagttgatatttgagatattggaaagacaaagttaattttgttatttctttacttgttattagtggagagtttctccttcaatcacactttccttaactcatgtaacacttaccttcttggttctcttacttttgtggctccagcttctcggtcaagtcccttgaattctagtattcattatctattctccctaggtctcatgaactccctttacttatctttcatttatatgcctatggtctccaaatttatgtcttcaacttagatatccttttttgaatttcagacctttgtattcagctacatttcagacatttttatttgtttatctcttaagcactaaatgctcctgttccttttgaatctgccyatatttatgtcctattataatggttagtaccacaatctgtgctgttactaaagctaaatactgtcatccttgaccttttgccccacagccactcagcctcaaagtcctctgagttctacttcataaatatcccttgaatacatctcatccttkccattcccacagcaatatcctagttcagatcacctggtttattttaactatctcttaatttgtctctgttttcatcttagaccctcccattattctccacattgcattccaggtggtttgtctaaaatcaaaatctagtcatgttgctaccctatgtaaaattttttactggattatcattattcttagaattaagtccagtttactaatttggtttactcagcatgtagtctttggtctctacttacctttctagccttgtgtcttatttctctctcaattagattgtatatgggccatcccatctattgtgaccctttatgcacactgctgctcactttgcctagaatacactttccctccccactcccaacttactgggcttcagttcttatcttatatattatcccttctcccctgctccagccaagtctgaattagctggttttgccatgagctcccttagtaccttggatgctcctgttcttagtatttattacctcacaaataactatgcatttctttttcaaaatagtctaaatataagtttattgaggatagtgatatgtgtccatagtctgtaaattagactggcacatgtgtctggcacatactttatgcttataaatatttttctattaaatgagagtaatatgaagtggtcttctgtataactataaaaccctattacatgattttcttacatgctacatatctttttaaatgatttgtccttttctgcatgtttttagaggaatataggaataagtaaagatctagtaccttttaagttagcatactttaagttttaatatcaataaatatgtttatttcagaattgtttaattatataaccctattttaattcaaaccctatcattggaatccctgttttaattttatcatcatgataatgcgtatctgtttttaaaagaggctacaagatgaagcatggttgtttttcctgatctataccttcattaatctcccattgctagtaatccttactgatggatttgatatttatatttaggctttaaaaaattatattccataagaaaggsagataatgcttaattgttgggcattttgtttgttacagtctaccctgacatttgcactatcagccttgtagcagtgagtgatgtgaataaacatgctgatagaattgctttttgggatgatgtctatggcttcaagatgtcctgcatgaagaaagcagttatyccagaagctgttgtggaagttttagatccgaagactcttatttcagaaccttgtggtattaaggtaggtgttttaccaactttattttttataatggyattgctatttttcttagttcagcatttgaaaataatatattgattttatatatgggctttcaaaacagtacttttcccattgtaatcagtctaaaacaaattgaggtcataatatttaccagttgactatatcatctctttagaatcacttctctgtatattmaaactccttacactcagttttacagtccttcaaatctaactctgaaccggttgaataatttatayttactttggcttaataaggtaaaaagtcctgctgtattatcagttctgcttcatcatcctccccagccttattttagcttctcatttacagccagattattcattcgtgtcatatattccacacagtttaacttctctcattcagatttcttccagcgttttcagattaagtaattacatatagtgaatttgcccatgaaacgaaagccctactatgttcagatttctcagttaattccttttgtgttttgtcatcttattttttgccatgttaatctctgggtttattatgaatttttctatgttgaatttacatgggttcactaataactttgcagcaaaaaataatactgcttttcttaactcttggtctgtttcaactagataatcaaatctagagcagtatgttcagtgttaggttcaggatattgtctttgtctcaagagaaaaaaaaaaaaagagtctcactctgtcgcccaggctggagtgcagtggcgcaatctcggctcactgcaatctccgcctcccgtgttcaagcgattcccctgcctcagcctcccaagtagctgggactacaggcatgcaccaccatgcctggctaaatttttgtattttagtagagatggggtttcaccgtgttgaccaggatggtcttgatctcctgacctcatgatccgcctgcctcggcctcccgaagtgctgtcttctcgttttaatcacgctgttactttcatatagcatcaatatttcttctctgtacaaagcagatatttagtacatatttaattttcttaaatggataaagcattaatagtatagagtaataaatgtgaagtttcttaacaagagcaggctgattaaaagtgcgttcagcttttaagaaaaacagtctgcttgatggttatacgacttcagtgctctggtacagtgagaataaagagtttatttgggctctttggctcaggataggagtgtacagttataaccaactaagccttaaagttgagcagaaagaggagagttggtggaggttgctgatttctctctctagtgatctctgcttaatgcaaaaactgccatgaataaatagttgagacagaaaaatttagacctgaaaataaggtgttaaaaagtgtatgtactcttttttttttttaacatttatttaagtaaatagtttgttctgtattttgcagtcctcccacaaacacattgtactgttaaaatgttttctcaaattgttttcaatagtgtctcagatgtgtggttacattaattgcattcactgggttatgatctactcctggctggatctactcagctgatgacggtctttacagcacacttctggttagactgctgtagttgaaaggtgattccatcccttctccaaagtataatggagaaggatttgaaaaagggcagaatgggaaaataaagatatttcgctattttttctctggatcgaatctccatagttttgctgttttgtttgaattgtgtggtttctcctcatatctaacaaaacttatcttcaattatagacatgaattttaaaacaactttcttttcattagcgtgtgttttcaagttggcagttcctataaatgtattgactgttatcacacatattttatagcagttgtggtgggtgtaccatacacaataggcaaaatgatgttaggtgaaacacaggaaaacattttttatttgaaagtatttattttagtgtgtcaggaaaactttagcacattagcactatgatttgataaatactattgtttacaaggagcctaagttaaatgaatttaagaaaaaattaacaagatgatagtactagtactccttaaacttataaataattccaaaaattagcatgtgagtaaagtttgcaaaactttggtttccaataatcatttgtgcataaaagaagtaatgtttgtctgggttgtttttgttttattttttgttttttttttttggactatttttactaagctctttcttcacttctttttaatgggtagcatatagattgccatacgacgtctatctcagatttggaattttcatcagattttaccstgaaaatcacaaggacatccatgtgcacggtaagctatttcattctgcttttacaaatttcactagcagtgcagttgattggcaggctaatgagtttaattaccaggcttgtgacaaatgaaaatgactattgcctctgacagtctaccattgcctttgctaggccattgaacagatctggttaataggtcagtaaacttcaaaaaagtttaattcagtagaaaaagtattaggaaaccctgtttacataatgatttttctttatagagtcttcattatttcctatcacgtggttagtcaagagcactcaactttatcttcaaagaccaaagttcatgccctattcctccctttaactctttacatttaatttagatggaagatatgtttatttggtagaatattttatgttttatatttatgtatgaaaaaattactgaactgctattgagttacctttcaaaaatctaataataatttaatagtctaatagaaaaaatcctttggaaaagttaggcagatctgggttcctatgtggttctaccacttatttcgttgttaagttacctaagtaatctgtacttcagactattcagttgctttaagaaaaatggggataattctgtttcgatgactcattacatggattcatgagatatatgtgaaaatacctacaatgtagccagaaacgttagrttattaaaatataaaaaatttttcatctcaaataatttataaatgtttatttttttaagataacatttactgctgtcaggagactcaaattgttcataaaatctgctccttatagtatgagtttatataggtggtattaacatatttatattattttaaaaatatatggtttttaaaactatgtcctcagaagtttacatttttatggaaaattgtattgtcagaatctgtaaaatagattataagtcatgttaacattgagtcttctgcctgattcttttaaatatttggttcagatcgatatattatacacaagacttcatgtctttacagttgtttcagttcattttgattcagtgattattttatatccaaataagtttaacaatgtactttgatgttttgagggaatcttcttttagttgaagttggttttataattttttaaagtttaaatatccagatttaagtttaatttaaatatccagattaaagtttaaatatcacaaataaagatttgtgactttggagcactcattatttatttaattaacaaaaagcaaaatttgattcatttcccatgtattttctaattctgctttttagtaattgaaattatttttgtcaattgaaattaggctaaaggctaactcctagactttcctttttgttttgatattattaatacatgagagttgaaaaaagaccatcttgattaatgaaaattgatcaatcatctataaaggaattcctagaataaattgtcatgtcaccagtattaaatatatatttcacatatattttcagtgactatcacatgaatcaaaatagagcagatgtaaaactctactgaagatgtcaaaagcttgtgcatatttgtgaactctagaaaagtttattgactttcattgaaatgttctttttttctagtttattggtcagggttcttagttttcgacaacagaatttaaatcggttggtttaaactgagagatttgttagagggaatacaatagtttccagacacattgggagacctaaaggaacagactgtattttcaacttctagaaacttctagaaccacacctttgaactggcctgctacagagctgcctgttttaaayagcctagcactgtaggttctatttaccttaattcccctagcccactccgtgttagccaccactgacaaccccagatgaacaaaaccctttactaccatcctggttcctggtcctctgtcctcccaacccaggtaggccatgttctccttccaaatcttcattcagcatatctgcttggtgaatctaggtcatgtggggccctagctgtcagtaagttttggaaagcagttttagctacagttttatactacagatctggagtttcataacacatatatggaattgttttctatttcctagtatttaggatagagtacaagaaggtttgtattaaatgaaactgtatccttcmgtcatcttagttttattctgtatacttaaaagagtaaaaagaaacatcttagttttattctgtatacttaaaagagtaaaacaaaacaagaaaaaaattggtaaagtctatttaattcaaagattgtaattgaacttttaatattgaagaatctaagtatcaaatagttacttgctgcatttgtccctgtacaaagttccataagaaaaatgaattrtaagtaaactgttacattatatctataaagtaccttttatttagatttgcatttttagtcgcaacttgcctgaatggtgtttatgaaaaagtttgtttggaaattaggtgagcctaaggtttgcgaagaaggtggcaggaggttggagtggagttacaggtgtctagttactgctgaataacctagttccataactcacctcaggaagaatgtattgttacaaaccatttattggatgcatgccaggtactgaagataaaatattttagtagttagcattgaatgttaactcttctgacattatcctttaaaatttagttaatattatcagaggaaggtaacgtacatcaacagtcgttgaacacttgaatgtcagacaatgtgctaatcactttaaaagcattatttagttctcataataaccatttgagatgagtactcatattattcccatcttactggtgaaggaaaaaaattactgttttacttgtgaaataaaatctccttactctttcctgacccaaaaaaccttctttgtgggattgtagaaactattaaaagaacttagagaaacctatgaataagatcttacaggggtagaagaaagcaggcttcgtgttgcatttgaaacagatttaacaatgtttatttttggcaaatagtccagcagttggaatgaagagggaaagagaatatgtataatcagaattcactcttcttagagacaggcctcacagattcatgtgatgaaatcagtaccagagttcatcctctttgcagcagataggaagtagatctttgaagtttttctttatcctctcagagtaagcttatacttgtttggttaagcatctacatttcttggaaacctccttcccagcatgctaactctaacgtgagcttgacatatgtaagatgttgtggcctaatgcttctattaggtgttcattatttgtgaatcttaactatccacccatatttacttcgattctcttgctctttgggatggtatcagctccttaccctccctcctacagacctatccatctggagctacttacgcaagcatggcctctttgaatggattagtcgcccagtttatgtgggaataatccataacaaaagtattaaaaaggatgagtgcctaattggaactttgtttcccctttatagttagaagaattagcgaagatattgaaagtttttgaaaaagcctagtaaaggaataaataaagtaactggggaataagaggaagagattgggcttttttagatagagggaagaagaaagtatctgaatttgtactgctaagtacaaaccttcagatattaaatgcttttcttcttgtgttgaaacttgaatgcttagctactaattaaagtggagaatttctctattatagttagcccagtttaaatatatgtatgatatatgtataacgtggtttttgttttgtttgtttgtttgtttgttttgagacagggtctcactctatattgcctaggctggagtgcagtggcatgatctcagcccactgcaacctccgccttccaggttcaagcgatcctcttggctcagcctccctagtagctgggactgcagatgtgcgccaccacagccggctaatttttgtatttttagtagagacagggtttcactgtgttggctgtgctggtctcaaactcatgtcctcagatgatttgcctgcctcagcctctcaaagtgctgggattacaggcatgaaccactctctgcctggtcataaccatttatttcttaatgagattctaaatttgtggcctaatttaaaagttagaggaaattggattttacaaagttacaagatgctaagaacaccccttttgtattttaatagcatgtatgctatagactgataatgcttttagatagcttcttgaagattattagaacctttcatgaaaaacattatcttctgcagtcttctccaccaccaaatacacacatccccatatgccacagacgaagcttcatggcattttaatgttttacattaacagactttatattttaggaatttaacatgtgatatttatatgtaaatgtcttgaatcttgaatcatctataatgattgaaggataatttttcaatgagtactggtaccacatagcagttttctgagcatttcttactttaggatatttttgacagtttagataaaattgtcattgcttttacaatagagatgaagtttagctggctcctgacrtttcatctatcatatcagcctgcttaacctagccaaaaatgaacaataaagtcagtgatttttgtggaaagtttataggtgttcaaaagcaaaagcggtaagactataaaatttagaagtcatatgttttatcttgtgagttctcgtttatttgtaatgtcatttgtgtaatattcgcttactctgtatgccaagtggcatttatattttcatctgtgtgtctataagctacttaaaggtatagaaaggtatgttcgttcataattctaagtatacattaaatgattttgaataatgcttattatagaacaaatgagttgtttaccttaaaaatgaaaatagttaagatggatttatcagattacatgctcacacaaataagacaggttgagtatctcttatacaaaatgcttgcttgggcccagaagtgtttcagatttagaaattttttggattttggaatatttccatttatgcattcctaatgcagaaatctgaaatccaaaagcatttcctttgagcatcatgtcatcacccaaaattttagattttggagcatttcaggttttcagattatgaatattcgacctgtaaaggtttttatttgatatatcatctcttaatagtttttatatcttaatttcagcattttttcttttattctacttttctattagcatgtaccagaatgactggtatagcaattttcagttttcacaaacattccttaacatgtttttcctaggaatttttcttttactacagttgttaaagataaacatctgaattaaaaaagaagcagacttttttaatacagtcatgtatcacttaatgagggggatatatgtgaagaagtgtattgttatgcagtcttgtcattgtgcaaatattatagaatatacttacaaaaacctagattatatagcctactatacacctaggctatatactatagcctgttgctcctaggttacaaacctgtacagcatgttactgtatttacaactataggcaatgacaacacaatggtatttatgtatctaagcatagaaaaggtacagtaaaaatatggtattacaattttttcttcaccttttcagttctggggttcatgtgcaggatgtgcaggtttgttccataggtaaacgtgtgccatagtggtttgctgtacagatcatcccctcacccaggtattatgcccagtgtccattagctgttcttccctcaacctcctccctctaacaggccccagcatgtgttgttgcctccccaggtatccatgtgtttgcattattcagctctcacttataagtgagaacatgtggtgtttgattttctgttcctgcattcgtttgctcgggataacagctctcaactccatccacggccctgcaaaggacatgatctcgttcctttttagggctgcatagtattccatggtgtatatgtatatgtaccacattttctttatccagtctaccattaatgggcatttaggttgactccatgtctttgccatcatgaatagtgctgcagtgaacatacatgtgcatgtatctttataattgaattatttatattacactggatatatgtacccagtartgggattgctgggtcaaatggtagttctgcctctaggtctttgaggaattgccactgtcttctgcaatggttaaactaatttacatttccaccaaccatgtaaacagcgttcctccttctccacaacctcaccagcatctgttttactttttaataatcaccattttgactggtataagatggtatttccttgtggttttgatttacgtttctctaatgatcagtaatgttgagctttttttccatatgtttcttggccacatgtaaagaagtgtttgttcctgttgtttgcccactttttaatggttttttttcttgtaaatttgcattagttctcggtagattttgaatattagacctttgtcagatggatagattgcaaaaatctcccattctgtaggttgtctgttcattctgatgatagtttcttttgctgtgcagaagctctttgtttaattagaccccacttgtcaatttttgcttttgttgcaagtgcttttggcatttttgtcatgaaatctttgcccgtgcctatgtccttagtagtattacctagattttcttctggggtttttatagttttgggttttacatttaagtctttaatccattttgagttaatttttgtgtatggtgtaaggaaggggtccagttttaattttctgcacatggctagccacttctcccaacaccatttattagagactcctttcccctttgcttgtttttgtcaggttttttgaagatcagttgattgaaggtgtgaagtcttatttctgagctctccattccgttccattggtctatgtgtctgtccttgtaccagtaccatgctgttttggttactgtagccatatgctatagtttgcagttgggtagcatgatgcctctagctttgttctttttgcttaggatcatcttcactattcaggctcttttttggttttaaaatagtgtttctaattctgtgaaggatgtccaatggtagtttaatgggaatagcattgaatctatacattactttgggaagtatggcaattttcacaatattgattctttctatcccttagcatggaatgtttttcaatttgtttgtgtcctttctgttttctttgagcagtggtttgcagttctccttgaagaggtccttcacttccctcgttagcagtattcctaggtatttttttttgtagcaattgtgaatgggagctcattcatgatttggctctcagcttgcctgttgttggtatatgagaatgctagtgactttttgctcattgatttttgtatcctgagactttgctgaagttgcttatcagcttaagaagcttttgggctgagatgatggagttttctagatacaggatcatgtcatctgcaaacaaagataatttgacttcctctcttactatttaaatatgctttatttctttctcttgcctgattgccctggccaggacttccaatactatgttgaataggagtggtgagagagggcatccttgtcttgtgcctgttttcaaggggaatgcttccacctgttgcccattcagtgtgatattggctgtgggtttgtcataaatagctcttatgattttgagatatgttccaccaatacctagttttagagtgtttaacatgaagggatgttgaattttactgaaggccttttctgcatctattgagataattgtgtgatttttgtcattggttctgtttttgtgatgaatcacatttattgattccatatgttcaaccaattttgcctcccaaagatgaagccaacttgtgctgctgaattcagtttgccaatattttgttgaggatttttgcattgatgttcatcaaggatattggcctgaagttttctttttttgtttgttcatcaaggataytggcctgaagtgttctttttttgttttgtctctgccaggttttggtatcaggatgatgctggcctcatagaacaagtagggaggagttcctccttttcaattttcagttgttttgaatggtttcagtaaaagtggtaccagctcctctttgtacctctggtagaattaagctgtgaatctatctggtcctgggctttttttggagggtggggggtggagggtggggaggtgttgataggctatttatcaccgcctcaatttcagagctcattattggtctcatcagggattcaatttcttcctggctcagtcttgggagggtgtatatgtccaggaatttatccatttcttctaggttttctagtttatatacaggtttttatagttttctttgatggttgtttgtatttctgtggagaccacggtaatattcctttaccattcctgattgtatttatttgattcttctattmtttattatctagctagcagtctatcgtattaattttttcaaaaaaacagctcctggattctttgatgttttgaagggttttttgtgtctctrtcttcttcacttctgctctaatctcggttatttctygtcttctgctaggtttggggtttgtttgcttttggttctctagtgcttttagttgtgatgttaggatgtcgatttgagatctttctgtctttttgatgtgtacatttagtgctatatatttccctcttaacactgcgttagctgtgtcccagtgattctggtatgttgtctctttgttctcattagtttcaaagaactccttgatttctgccttaatttcacttatttacccaggagtcattaagsagcagttgttcaatttccatgtagttgtgtggttttgagtgaatttgattgtgctgaggtttgagagactgttatgatttcaattctttttcatttgctgaggagtgttttacttctggttaacagctcctgtaatgttttaccatgattcttagcttctttacattgggttgcaacrtgctcctttagctcagcaaagttcattattacccaccttctgaagcctacttctgtcaattcagccatctcagcccagttctgcagcctcagcccagttctgtgcccttgctggagaggtgttgcagtcatttggaggaagagaggcactggctttttgagtttttagcatttttrtgttgatcctttctcatctttgaggttgttaacctttgaatggggtttgtgtcaggtttttcattgatgttgttttcggtttttaacagtaggtccattccagaccctagttgcctcagtttttcccataccaagtgtcatacagggtatgaccagtgaaggctgcaaaacagcaaagatggcagcctgctccttcctctggaagctccatccctgcagggtactgacctgttcccagcctgaactgcacccgtacgaggtggctagagaccccttttgggaggtgtcacccaggtagcaggagtgggatcagggatccgcttaaagaaggagtctggctcctttttggtagtgaagctgtgctgtgctgtgggagaccattccttgtccagaccatctggactctccagagctggcaggctggaatagtcaagttgacagaactgcagagatggcagccgcccctccccctgggaatttggtgcttctcaggcaaacctctctgactggaattccaagccagtggggcccacagaattacactacttggcttcctggattcagttcccctcctaagagtatctagggacagatctctggccttgccaggaatcctggggccagagtatgcaaaactcctgagtctctgtgtatgccccagcggctgctctgccaggactctatacaggtgctatgtattggaccgaaggccctggtggtgtggcttacaaagggatctcctaggtgcaaagatccatgggagaggtgtggtttcctgggcaggatcgcacaatcactcactgcttcccttagctgggactgagtgttcctttggcttcgtgctgttagaatgcttgttcttcagtactgcaaggaaaaatcagcatttagacaaaaagttctctcagcgaggcartggtgctctttgcagatagaacaatggcaagagcacacttgaacaaaggagggaagcaatttatgtcttttatgcagcttgtcttttctactatgtcttgtttccattggctggagccagacctcacaatctaaactaaaacctgactggctaataattttamacttttctaaataggtgaaagcaatggaaggacaaaggaaaagaggaagttgtttactaaaggacttagaaaagtaataacattcttaaataaggaaggggtaggctgcaagctgggacatgcctgtgagcacatctactacaagtatcttggttaaggtacaaggacatagaatgtactacttgcctgtgagcctgtgtaacagctacataggatagggcttaacaaagggttattagcacaaagcaaggaggcttgaacaaacttagtctttaaaagaaattattatttctaacatttattattatcctttaacaagaagggaaactttgaagaggaacttctactttctacagtgccgctcccagttggttcatcaccccaccctgcttttcttctttctctgtgggttgagatgtttgcccagtcagtcccaatacaagaacctggatatttcagatgaagttgctgaattcatttgccgctttcattcttctctgtgagtgctgcagactgcagctgcttctaattggccatcttggcccccttagtattataatcttatgtgaccaccattgtatatgcagtcattgactgaaacattgttatgtggcacatgactctgtttttacttaaaaaacctcttaaagtcctttattttggattctgtcaaacttcataaatttgaatagtgtcatgagagatacttaatgtctttttttttttttttttgagacagagtctagctctgtcttctgggctggagtgcagaggtgcgatctctgctcactgccacctcaacctcccaggctcaaggaaattctcctgcctcagcctccccagttgctgggattacaggcagacgccaccacgcccagctaatttttctattttagtagagatgtattttgtatttagtagagatgggatttcaccatattggccaggctagtcttgaactccagacctcaggtgatctgcccacctcagcctcccaaagtgctgggattacaggcatgagccaccgccttttaaatctttacattaacagtatttaaacaaatattaaatgctgactatgtgccaagtacttgtctataaagcaggcacataaaaacaaataaaacatggcggggcacagtggctcatgcctgtaattctagcactttgggaggccgaggcgagtggatcacctcaggtcaagagttcaagaccagcctggccaacgtggtgaaacctcatctctactaaaaatacaaaaaatattagccaggcgtgatggcaggcgcctgtaatcccagctactcaggaggctgaggcagaagaattgcttgaacccaggaggcagaggttgcagtgagctagatcaccctattgcactccagtcttggcaatagagcaaaaactccatctcaaaaacaaaacatattctctgccctggaaaggcacttaaatgaaaggaggcaagtactatgaacattttaatatgaatgatgaacattttaatatgaatgtaaagttttagagatacaccaagcgtggtgtggtactgggtttctggaggaaaaatgtagttaataaattttacggccaacattccatgaggaagtgaaaaactttgcccctcccaaacccaaaataaaggaaaagcttgaagtatggtagtcacttcataagttcctttgagataatttttttcacctactttttaattcattatttcttttttacattctttctgctgttcatttttagccaataaatatttttatttcagatatcttttagttgtacaatttctattttcatttttagagttttttttatctctttaaccagtttgatccatctttttatctgaattccttgacatttataatcattcttttaagatgtaatttgctaattccccaagtgatctgcgattttgcttctcttcccttttaagggtcacattttttcagtttgttctcatattttatgctagacattgtataaaagaataatacggactagagtaggtaatattttcccttagaagaatatctcctagctagctagcgggaggggtcgatcccttttgatttcccgtgtcttaagcacaagatcaagcccttccctgtggccaagttcttgggaagaccatcaaaataaagctgagtttatggtttattacagtaaggatgaccactacattgacagtcttaatagcatctcagaggaaggacgtgagaatatttatgaaattctcagcaggtctttcagtgtgtgcattggagggaaaaggtcctgattaggatttggcatgagttgagaactggtagacacatcaaggggtgggttttaaagtgagtcttggccgggtgtagcagctcacggctgtaatcccagcacttttggaggctgaggcgggcagatcacctgaggtcaggggttcaacaccagcccagtctctactaaaaatacaaaaattagccaggcatggtggtgcatgtctatagtcctagctactcgggatgctgaagcaggagaatcacttgaacctggaggtgaaggttccaatgagccgacatagcaccactgcactccagcctgggtgacagagcaagattccgtctcaaaaaaaaaatagttgaagagtaaacagcatagtgagtcatctgttcttgacgggagggtatttactctcctgaggattcattgatatatctgttgttcaaataaatagattttcttgaggtacctgaaacaaataccttcttctttctaagcagtagcttctggaatagcagataattgaatagtaatgtcgtattaatagagatagtgaactgtgtggccacagaaggttttggcttaggagaaaccccccccccccacttcctgttttgcagcacaaccaccagcttcatccactccaataagtaacrtgagggagaattggtttgaagagaggaccaactctgccttttggatttctccaaattccagggaactatactagtgtaccagtgcactgggcctggctagtgtttccttgtcccagcaaagttcttgtgactgtggcatttttgctactttacccactacatgggccctagcattgggcaaacgccctcaggtatgaaagcagctgtttttgctcagctaggaagaatttattcccctctggagacagttatttagacctatttgcaagtaagactcctctgtggttttaatgagaaatgtttagtcagtctagtgttttctttttgttatgttagagtgagggtcttttttatgttagagtgagggtcttytgcaaccttctacatcctaattagaagtcatccttggataaattgctttttaaagcccaaactggaaaataaatctgggcctacatatttagaattttagaaagttcagaaataaagttaggaaaggtaaatgaaagtaaacataagttagtgaagtaaaggtaaatttcatgttacctttcagttctcaattcagttctttgatgatctacttgataggagttgaaggctgcagcaagcaatgattgtaccactgcactccagcctgggtgacagagtgagaacctgtctctttaaaaaaaaaaaaaaaactacttgataaatgatagagatatttaaaaggtaccaatatttagctttggatggaatcaaaacaagtctttcagttactcagttttttaaggctaatgcaattgctattaaaagaaactttaaaatgtttacagttcaaaccagtgatctcttagtcataatactctgttttcattttactttttaattaagctttaaatttttctaatggcttaagaaaaaacttcaagattagcccatttatttgcaattgtgttctttaaatcttataatgcttctggaaaatctctgacagcagaatcctactaattctaagcttatttctaggtattaaattagctcttagtactttttgttgtaagttgacctaattttgaccttacaaagctaatcagctaacgaaactaattattaaaacaattattaaaacacatctgtgctgcttagaaatagtaagatttgtcttgaacttgcatcataggttttaatgggacatctggtgtatattttaataggcttcattaagtaaattttatgtcttgggggagaacatttgtcattatgtgatcccacctctacagttggttttaggctcctccttgtgaatgaccatgtggtctaaagtatggtcttgaactttctactctgctctgaaacctgaacctttgtagctgggcttaggtggtggtgcgaacatttaaatctcttcgtttattctcaggaaacgttctttgagtagtagcatatgctaggagctgagaggtattgggaatgtagtaacaagccacacccgatagttcctctattcaggaggcattaatagtggaaacataataaaattcaccctatttgcatcactacctttcagtggaaaaaatattcaccctatggatattagataatactaaagaattattgaattattgaacatttggttacatgtgataagggcattctagttatctaagaaaatgtccgtctttttacagacgcaaactgaatttggagggaagaaatgacataatatagggtacttgctcaagagattaggtgaagtatgtgtgccgaatataggtttgtcagaggttctctaattgtgtatgtttgaaatttttgatagtatttttttaaagaatctcacaacaataagaaacgcctaagagtgacgaggcaaaagtactgcactgagataaagatatttctgtatatctcagccacctgctatagttaccaaagctgaacacatgtttaccctgtgtcttaaccatttccctcctggatccagatacacacacagaaatatgttgacatgttcaccaaaaaaaatgttcaagaatgtccattgcggccttcctcagccccaagctagaaagtaggatgggtaaatgtggtatatttatggaataaaataaagcattgaaaaagagatgagcttggcaatatagcacaacatggatgaatttcatgaacagttgatttaaaaaggggggaaaggctgggcgcagtggtttacacctgtaatcccaacatttggaaggatcgcttgaagccagaagttcgagatccatctggtcatggacatcagaatagtggttacaatttgtggggtgacttgatgggaaaggagcataaaagaagtctctggagtactaggagtggtccgtatcttgatctgggtagtggttatacaagtgtgttcaccttgaaaaagttcactgagctgcatcccaatgatttgctcacttctctgtgtgtgtatgtgtgttctatgtaaaaccagtggttcttgcgttagctagatatctgtttttttgcttgtatatagtacttcagttgaaaagttgaccaaagccaaaaaatgtctatctggtggtcagtagtttgataggttcaaggagttgaaagaagcctaggatggctgggacatgtagatcatagtgctaagagatggaaagcaccttgtgctatttggccrtttcagttgtgatgttttttaagtagagtgttgtgatcagaagggccctttagaaagattgtggctagaatatggagaacaaagaggagaccaccagagtggatgtgggaggccaatatgtaggttattctagtagctttgcagtgacttacacaaaggcagttttagcggacttgttcatgagttacctaagagataaaattgacaggacttgagaatgagttagatgatggggagtgagggcaataactcccattgctctcagtatcaatgatgactccaaggtttcttacaygtacaatttgaaaaattatggtcctgtcaaagaaaattggaagagcaaatttagaggtgaggatcagatgctcaattattagtacgttgaatttcatacctttgagttatgtaagtagtgatatccagtaggaaattgaaacacagttctgtggcctgtcttgtcaagtcatacttgtgacatatttggcccagatacataagagtaggaatcaaagaacattttatgaaagactttttgaaaatatccatcaaaatatgctgctgacactttaacaaagcattttaaacaatgataaaattacatgaatgaggatgtattttttaacctatgctattcsttgaggctgttggattccaaaagcttgttttttaaaggaaatccagtggagtagcatcatatgcagatataatttacgcaaattaactgcaagcattcaggtaaaaaaaaaaaaaagtctgagagaaataatggtctcagtagtacagatgattctgccctcctttttaattgtgaacatgtgccccaaaatgagcatgatgtgagaaacacatctgctgtttctttagtagatttctgtaggatgagcatcttgctagactgcatgattgtctttataaaagtgtgtatttttaatacaatatggcactcactataagccatctacttcatctggagcccagccaaagaaatggtgatttgtaccattgcttaaagaacgggttgtattgaacttactgagggatagtttatatgttagtctctaaaatgacatcttaagagattttccaaggtaattttgagatttttcccatatgacttatcctctgcagaatatgagtactataaaataatgttttgtcttattactttgtttcaaagggattctgtctagttctaatattttccatatttgaagtccaggtgcaccttatgcattgctctccaaatttacttccatttgacttcattttatccttcatttttccaaccctagagagtcaagagcccttgaaactggaccccagagtattttagccttttaaaagtctgtatttttttcaacccattctttgtgtttagcttttctgtctactctttttggaaacattaccattatgaaaaaattattaagaagataacgtttcctgctttggaaaacttttaggtatatgttcgttgcctagaatagtgggaggaatcgcctgtaatactgaaatcatatttgaacctagtcagagagaatgcaaaagtccacaaaatgaggaaccctgcagttgagtaaaataacctgtccatagagttaatagagattcgtgtgcttgatcctcttttgaaagccatgctgaaaaataatgcttctgaatttctgtaattcattgtttaaatttcagagacattaaagaaattttatcagcattttaaaaaattctgattctaaagcctccaagtgagtgatattataaaaggatttgaacatcaaattgtcctaaaatacaatttgagtggaatcttaaaattcttaagctatattaaaatcatttaattctagataggtataggtttatgcttgaaatcagcaatgttgaaggacaataaattctgagaaattagcaggactagaatatctatctgaagtttagcaataagcacaaaatagtgtatttatcaaataatcaataagagtggactcttgattagagatgtcagaggggttctccctagacttatcacagaggctgtcaattaacattattagattgtgataagaaatgagttggaccaggtattttcctttttgattcagccggttacccatggagtaatgacgtataaggaagtaatcttcccaagttcaggcttattttaacttaggcactgacagacaccattatgaatattggcattaagatcttctaaaaatcctgaagtacctaatgtttacagacattttatgtatatgtatgtattaacaggaggaaatcactcctcatggaaagacaagtcaagtcaaaaattagaaaaataaatttgatatatataccagatggctcagaatataccttataatatttgccagatttttagttcccactctatatatcaggtacataacagaagggcttaggtggtgagttggtagctatctttctaccttacttttcaaaagagcaaaaaaaaactattcatttcagaaaatagggtatatcacatcttctatatgtcccccttttaccgtctgttaaatcgttctttcagtgttccatctcttaatttatactattgaagggttgtaaagacaagtagcatttggtagaacttggtcacctagacacaaaaattagttttaatatttttcagttttaaacttcttcagcagtcataaaactaatttttttatgctgcgttgatttgtaaattcagtgtatctgttttgttcaggtgaacaagtgtattcttaatattaaaatataatgtttacttacgactgatagtatcttctgtcatttgaggaattaggaatggaacatagggcttttgcatggatagttttgggggaagattggaaagcagcacaaaaaatggaatataaggaaacagtaatcattgatatcaagcagtggaaaaccgatgatgtgtgagggagcaggagaagagaaatctagagaagcagtgggctgcaagcctttttaaatggcagagattgccaaaaaaaaaaaaaaaatactatgcaacatcacttttcattcaaacatggactgaacactatgtgtgggcttctgtgctaggcactatgaatacaacaaataatcaaaatgtaatttctagccctggagacattcatttagaaggagaggccaacataaatggagaattgtaatgtagtgctctataatagaatagcagaggcatataaaagacacccgtagccttgtatactcttcctttccctgatccctgctcgtctttaaggtttttactttaagtatggcttcttcatgaaagcctttctaataccatatgtattgtattagtgggaagtaattaattgtacagatgagggaatatttctctgaagttgttgcatctgataccagttttgagttaaaaataggaagttataagttacagcatcatcatttccttttaccaaaggttgggacaggttgaccatatctctttatcatttaacaaatagtttacttaataaatcatactgatttcctatagtccctgaacattccaggatatttcatgccttctgtgcagtttcaccatttagatagcatgcccaggcatgcttaggcagtgaggatgcagaggcgaacaaagaaatggtaagactgcccttaaagggctattgggatctacaagtgaacaaagacattgaacaaaaagtattataaatatagtgagtgttattacaaggagtgcaggaacattttatggatgtattataccctactctgggattaaagaaggctgcccagaggaaataatatttaaactgagacatcacaaatgagttagtttaagaattggggggagtgttacagtgatatggtttggctgtgtcctcacccaaatctcatcttgaattcccatgtgttgtgggagggatccagtaagaggtaattgaatcatgggggcaggcctttcctgtgctgctgtcatgacagtgagtctcaaggtctgatgtgtattataagggggagttttcatacacaaactctctttgcctgctgccatccatgtaagacatgacttgctcctctttgccttccaccatgattgtgagacttccccagccacgtggaactgtaagtcccattaaacctctttcttttgtaaattgcccagtctctggtttgtctttatcatacaggtagggggccttaggtaggaaaaagcaatacagtaaataatcttcctctttgtagtggtaagccacataaaatggagaaacccttttgccgaaaacagytacaaatgccaaaaaaaagttaaatgctatctgtttgaagttaacaaataaggaagtactactaagccaagactcagaaaagaaggtaatctgaaaaatgagactaacaattggggctgcttttgccctataggcatttaccaattcagaggaaggagctgaaagacttgtgtagcccttttgatattgctcacgtggataggaatacaaagtgggaccctaatagttttgcaggactttgcattgggactgtaaagactgtgcccaagaataaggtatgagagaagtaaatgaacacttgcatggactacagcacagcttcaagtcatctgggtggtccaggaagtctcaaaccctgatattagattaagatctcggtttgccatgcccccaggttccttgcagaaacaaaaattctttctagaagattattacaggtttcaaattattttcacaaagtttttcaaatattaatgttcaaaacatattcagaggtaatcagtcacacaaggacacaaaacaacatgaatcaagaaccagttgaagcagtagacaataaaaacagagctctaggtgctccaggaattagttatagcagacataggttttgaaaaactatgcttactaaattcaaagagaaaaaatactgcaaattttaacaaatggaaacattttttaaaatacggtttggaaaagaattgaacagacattctaagaccaaattaaatatgatttgaacagcagatcttcatgtattagtgtagagaagatctgcgaactggattttagggcagaagaaaatgtccagaaagaagcctggagacatgcaagaatgagacagagggaagggcaagaaataacgtagatacaagaaaaggtctaattacatatacatgtaaatgggcatcccagagaaaaggaggatgagaatgttacagtatttaaagagatgatggctaagaattttccaaaacagatgaaagcaacaatttaagaagtcaacataacctaaatagcataattttaagattgtatccaaatgtaggtgtatatctaagagaagtgaaaacatgtccacgcaaatgtttatagcagcattattcataatagctaagaaatggaagtaattcaaatgtctatcacctatagaatggataagtaaaatttggcatatccatgcaatggaatattattcagctacaaaaaagaatgaaacacgatacaacatggttaacccttaaaaacattacgctaagtgaaagaaaccagtcacaaaagaccatctcttatatgattccatttagatgaaatatccagaataggtatatttgtagacacagactgggcaagaagagaatggatggaagatttcttttgggggaaatgaaatgtttttaaaattagattgtaatgatggttacacaactctgagtatactaaagaatgttgaattgtacaatttaaatgggtaaatttttyggtatgtgaattatacctcagtttaaatgagggaagagaaacccacacctagacatatcctagtaaaactacagaaaccaaagaaaaatctcaaagttggtggaactatggtgctggaattacctttaaagaagagctaagtagactagtagataatttctataattggtaaatcttcaaactgaatacagctgtgaaacccacacccagatgaagaaacaaaacatctcagcaccctagtagtcccctttgtacacctacctaatacagggcatgtatgccctgtattagccaggtgcacaaggaacaatggaattcggggagcaggggagaggaacattgkaatcagaagaaaaaaagacagaagaaattgtaatgatgacattatcactgtgctgccagaaaataactgccaaccctgagtttaacccaactaagatttcttctaagaatgaagctggacaacttggctgggcacagtggctcatgcctgtaatcccagcacttcsgcagggcgaagcaggcaggtggcttgaggtcaggagttcaagaccagcctggccaacacggtgaaacctcgtctctactaaaattacaaagattagccgggcatcatggcacacacctctagtcccagctactcgggaggctgaggcaggagaattgcttgaacccaggaggtggaggttgcagtgaactgagattgcacctctacactccaacctgggcaatagagtgagactccatctcaagaaaaaaaaaaagaagaagaagaatgaagctgaaataaagatattttcagataagcagaaaagaagagaaagaatttgccttaaaaacctgtgccaaaggaagtaccgagggatattcaggcaaacagcaaatgatccctgatggaaggccagaaattcaggaaggaataaaggtgaacaaaactggtaaatatttacataccagtagttctcttaggtatatacccaatggccatgttatgtatattcacaaaaaccgttcaagtgcctgtcagcagtagactaaattatatagtcacatataccttacggccatgaaaatgaatcatctgcagtaatgtagatgaatttcataaacaatattgaggaaattagccagacacaaaggactgcctgatgtatgattctttatatattgaagtataataggaaaaatgaatctttgcttaagagtattaggataggtcgttagaggcataggtgcatgagggggactactagggtgctgagatgttctgtttcttcatctgggtgtgggtttcacagctgtattcagtttgaaaattcagcatgatgtacacttaygtgcacttttctgaatgtacattataaagcagtttctaaaatgaaaaatcagtaaatttcaatgaatatgggttgtataaaacaattttgtgtttatagctaggaagaaatgtgaggtatcaatttatgaaatgtcaaaatgaaagtattcgtgttacagactctgaagatgatttttgccccctaaaaccactttaataagcaattttgaaattacaaggaagcaatcccaaataaatttaaaaggagtttcagttatcttgaaatattctatgtagatcagaaataaattacattgtgtttttcaataaaagtatttttaaaaatatttttggactattgcctgttttactacttcccatattgctttgtctattttttaccaccactcaatctggcagtatctcttgagacgtatatggcacttaatgtgtattgttccctagaggagaatcatgaaagaaaaggtgcagattttctcttgggatacaatagaaaattaattgaaaaagaaagagtccgtaatttaatgtatagttacaattggggraaaaatcataatatataattttcatatttgttgattatgtcttcttaaacgccatttattactagcacagttcatgctctgtatgtggcagctcgtatagcttatgtttgtattttcatctccttggtttatatatgatgatctaagctataacagtcatttttatggcattgtctgcttactctttctttgcttgcttcagactcatcagttggcttttgcattccatattgagattttgaaagaaatacttcaacgaaaaatgaattgtatttttgttatagtgattctgctgcatggattacaagcactctatctccatgcttggataaactccatcaaaagcacattatcctcctacttctgtggccagctgcctaattgtatctgctgtaaccacatgctgttggaacatgataccaatgaagaacagaaatgataaattactccctgcaggtgatagtgataatgataatttttaatttccttcttcctcataaggtctagtctgatcttatttcattggttgccatcctattacatacacacaatgtgtcctctttaaagaaatattcatcacactaraatacctgagaaagtcattttttatcccaaatcattgttcttcaaatgagtgtatattaaatgaactgcatttacctttatacatataaacaaaacatggcttaaaacagattttttcatgattcagtttacaaatgccatgagttttctttttgtgaaatccacaaaaagatgagttctgaaactattacatgctgaggaatatttaagatgtacaacagagctccatgcttgtattttcctatgtgcatcaaagtaattgtcgaggattctcacaaaatatcaagagtgatcaagctatcccagaaattcactatgtatacgtagtttcctttcattctgttttcttctatcattgtttttgtttttttactacttaccactcattctcccttctctcactctaagggacttttataactaaacttttagttataaatttttctgactgtggtataattcagtgaaattttatttaactgtgaccttgcctttgcagattaacccaactcctacagatagattttaatgcttttttycccctcagcagttctcattgccccaacaagatatatacgtgagacaaaggagaaatttcttctgcagtcagccttcagacctctctgatcttttacgagcatatgtcaagttgtagctccagttagttatttgttgccattgcctattagtcattatttcctatggttgtttattcttatatttgaatgacttccacagagataatgtatattcattgaaattaacatttaaaagatgttaagatagcctgtcaaagtgatggtagcaaggtggccaaactgtaattgaaaatagtggcatgtttatattttcctgacaaaataagtcatttattcctaaatcagctgatatttggttatatcattattccttatttaatagctttgcagaaataaaaacactaatcataattcatttggttttatattactatgtttcaaattgaaggggtttttttttttcttaatctcttttaattaagagttagtagcatgcaactgttgtcccagctactcaggaggcttaggcagaaagatcccttaagcccaggagtttgatttcagtctgggcaccatagcgggactccatctctaaaattaaataaaaatttttaaaaataagaatcacacagaaaagaaaagaaaaaaaggtaacaccacaaaccctgtctctttaaggggcattctagatcatgttggtgtttgagggtaracacccattttaaaaccagaaactccctttgtttttttcagagcagcaatcttccactttctcaactgtacgaatgctgtctagtgagtagatagattatctgcacacagtttgaattttaggtgaattccttcctaacttctcctcatgcttctgctttctgtttaatgtgtgctgtggaactgagtattactgtaaaccaaacctcattagaaatgtgactgtgcttgaagactcaaagatactgtgaggcatttcacatagatgcaatttcagatatttgtcatagattctttccagtgcttacaactgaagttaactatatctgtcatttttctttgtcttaaaacttattttttggttacccagaacttcccagtatttctttcactatattattaagggctggaaatttttaactgaaattcatacacagatttggagattgattaataagcatgtgtggctggacgtggtggctcacacctgtaatcccagtgctttgggaggccccccaaaaaatgtggggaaaaataaatcctagtaagctaataagagcttttgtgaaaatttgggtttaaaagcagcttttgtgacatcttcagatacatgaagagaagcatttctaattctgattwaaaaaagactggcaataaatataacagttatagaagtataattacagaaagatgagaggctgttacatgagtttaaaacaattttaaaaggtacactaaaaattttgaaaacaaaaggatgttttagaactatgggttttctgttcttgttgttgttccagtttaccttctgaagaacttcttttaaaatgtttctagaggaagtctattggcaatgaatttctttacttttccttgacttgaaaatgccttcattcattctgtctagatatagaattttaaaacttttttttctccatcagtgtctttttcttttccatctggaccaccaatgacacgttagatctataggtctccaaggttctataacatgcattttaattgctgtctttttcccttcttcaaattggataatttctatcaatcttcaaattcactgattttttccctgtcatctccattctgctattcaacccggaagtttcagttattataattttcaattgaaaatttttcatttggtgcttttttatggtttctctgctgagaatttctgtcttttgattcattccattgtgttttctgtcaccgttggaacatggttataattgctgctttaaagttttgcttgatagtttgagcatctggattatctcagaggtggcttgtcttttctcctgagagttgttcaattttcctgattctttgtatgttgagtaatttgagattgcaccttagatgttgtgcatgctatgttgtgtaaactgtgtgtcttgttaaaatcttaaggatgttgatgtttgttgttagcagtcaagcccagttaaaatcagaccataagttctgtcttagtgtccgagcagacagttgaccaagtctcagtcacattctctaagcctttgttatgctgttttgaggctgtcttacacatacctagtttacggattagtctgagacttttacagatttttcaaatctcacgtcagttctctaggcctttacttgttggtttcggttttttttccatgcatgttttatccagaggttaatcctgagacttgcagcagtgattcaaattttagttcaatgctctaagcttttgctgtgtgggtttggatctcacctgaaaatgcgtaatttgggggttaggctgagacttctgcatttcctacatacagaattagatcttttctagctctctcctctccatatttgtcccacatgttccatgcttttcagagttaaaaattattagttccattcaagttcagttagtcaatgctttaataaagtatactgactatgtaataaagctagccatatttgagactgaagactaaaaattttaatttggctaaaatttattgagaacctactatataacattgtattgggtaaggggcatagaagtgagttatacatatgccttgctcttaaataaattgcagtataaggcaaactgtaatatactatcgtaactaacataacagaatgtataataaacacatttgctcatcaaatattgtattgtattgtatcctatgggccaggttactgctctgggcactgagagtatagtggtgaacaagacaggcatacaggaataaataagaaaacagttgaattggtctgtgaaggggtatcataagtatctggaaatcaactgataaagttatatttagaaatattctaattaaccacgtggtttttatgataatctgtggctgagtactacattgttttataattctatttggcagaattattactagtattttgattctctcttggtatctaaattgcagtgaacctcagggttaaatattgagtttggtttggacctaatccatattaaccctaccagatcaataaaatgtcacatttttaacaaaagtagcagagtacacaaattagctttaccatgatttttcaaaaaatcagtgtcctgttttttacactttctaagcttaatgtaatgccagctttaaaaagtgattaagtccagctagttccaatagtgaaagaaaatggaatggtatttaaatttaaccaaaaaactcaaaattatgtatttatctgagtatgttaatttctttaagagatcttttgtaggctgggtgcagtggctcacacctctaatcctagcactttgggaagccgaagtgggtgagtcgcaaggtcaggagttcgagaccagcctgaccaacatggtgaaaccccatctctactaaaaatataaaaattagccgggtgtggtggcgcacgcctgtagtcccatctactcagccttgcctgaccaacacggtgaaaccccgtctctactaaaaatataaaagccaggtgtggtggcgcacgcctgtggtcccatctactcaggaggctgaggcaggagaatcgcttgaacccaggaggcggaggttgcaatgagctgagatccctctgggcaacagagcaagactccatgtcaaaaaaaaaaaaatctttttgtactatcacaataacccttagagctcactttggagtttctcctttgagtacttgcttaaacataagatttgagtactactgttcattttttcaggaaaaaaaaaataagtaacattttaaaaatctttatttcatcacaaaaatattcatagtacttaaaaacagatatactggactagaagaaattaaatgaactggctttgtataaataggatgttttaattatttattgctatgtaatagcccatctcagaactctggcttgaagcccaaaccatttttatctgtttgtttccgattctgcaatcctgactggacttaactgagtagtgcacttgctggtccttcctggcatctttcatgccgctgcagttgtctgaacacttgactacagctggagaagtcaagatagcctaatgcgtgggtggacatctcagttggcgagtgaggatcagtgaggggccagctgagtctctctctccatgtgtgttcacctttcagtggtctagcatgattatttctctaataaaatgtactaattatttgattagccttattacctttattatgttgtttctgtgaggaaaagccaaattacattacttcgtttttacttacaacatcttttccaggaaaaatattgagtttaagaggtatttagtctctgaaatggtttatcatttgccatgtcttaagagacagtaatgagttattatattatgtaattcatttagtaagcatttatatttctttttttaaaaaacaggcaattgctggctactttgatatatattttgagaagaattgccacaacagggtaagtatcatgaattatctcataagaattaattattacagaagtacattatattttattttgtgccccaaggtgtttaatcataagcattttgctgctgtaagcaattggggcttgtgtttgatgtcrtagattaatgtaccatgatattaaaaatcttgtacttcatcaaatacctttgaactttaccaattcaggtcgtgttctctacgggccctcagagcaccaaaacacactggaaacaaacagtatttctactggaaaaaccattttcagttaaagcaggtgagaaagaatagtaggggggaagtatcttattcattctgaagtaaatgatattcattcattttacagccactttttatgtgcacactatatttgttttttgagacggagtctcgctgtctcacccaggctggagaacagtgatctcggctcactgcaacctccatcccctgggttcaagcagttctcctgcctcagcctcccaagtacttgggattacaggcacgcaccaccacacccagctaatgtttgtatttttagtagagatggggtttcaccatgttggtccccaactcctgacctcaagtgatccacctgcctcggcccccccaaagtgctgggattgcaggtgtgagccactgcgcctggcctgcacaatatatttgaagcaatataacagatgttaagaaaagatattcttagagcttaccatctacataaattttagatggcatatcatttaattaaagacataatttaagaaaaatttttaagtctaatttctgccaactaaaataaataagactacctggctcttaaagtgtcacaaaataattcagaaaactttcggcaataattagtatttaataagttacaaatataactaaaaatattttctttctccaagtgactgaagagaaatattaccaataaaataaaagttaaagacaatttcattcagtagttattgtaggccaggcacagtggcttatgcctgtaataagccactttgggaggctgaggcaggaggataacttgaggccagttttgggttttgttttttcttttttgagacggagttccactcttgttgcccagactggagtgcagtggcaccatctcagctcactgcaacctccacctcctgggttcaagcaattctcctgcctcagtctcccaagtagctggcaccaccacgcccagctaatttttgtatttttagtagagatggggtttcaccacgttggctaggctggtctcaaactcctgacctcagacgatctgcccatctcggccttccaaagtgctgggattacaggcatgagccaccgcacccagccgaggccagtttaaaccagcccaagcaacatagcaagaccctatctctacaaaacaataaaaattatctgggcatagtgacaaaagcctgtagtcttagctgcttggaggctgaggcaggaggcttgcttgagtctgcagggagctatgatgataccactgcactccagcctgggtgacacagcaagaccatgtctcaaaaaaagagaaaaagttattgcattcaaaatatatttgtcttagcattctctccactgtctcttccctgcctatccaaatcttatgcagtattcaagggctaatcagattctattttttattttaaaaactcattgattgttcacttacattagcacctatagttctgacatacctatatatttcactctaaaagttagaatttgattatggaatttaaaaatttaaactgcttactacatataagtcttcttgtaccaccttctctgaaaacctcctgagagtacaaaagctgaatgtataacaagctgcagtgaaaaaaatccagcttcaccaataactcaggaaaaggctaactgaaaccatgagatgctgtttcttgtccatcaattgggggaagaaaatacataaagtttaacaatgtcaagtgctggcaataatgtagccaaatggaactttcattcccttttgctggcttttaattagtaaaactttcgagaacagtttgatactatgaagctaagtatagatgtaccatccctacagctaagcaattttttcctaggcatgtattctaaacagtctctcccacaacatatgtaaaaatctttatagtagcatgttttatagaagggaaaaattggaaataaccttaattgtccctcagcagaagatggataaataaatgtggtagttgcatagcatagtatctggatcaggtaagttatgtatgtatgtttctatcaaaaacaacattgaagccgggcatggtggcgcacacctatagtccctgctacttaggaggctgaggccagaagttcccttgagcccaggagtctgaggctgcagtgagctgtgattgagctgctttactccagctggggcgacatagtgagaccctgtctcttggggagttaatgtaagggaggcaacattgagcaaaaaagaaaattgcagaatgagtctgacaagataccatttatgtgaacttttaaaacatgtaagcaaccatacatacacatatctaatacaagtatgaaacaagcagctcagattcagcatagtggttacctctggatagaaataggattagggcaggctacaactggggtggggggtgggggtcaatgtcatataaaagacatataaaagaaaactttgtaaaaaattggaggaactctgatagattttacaaagctgagtggtgggctctatattacagttaccaggtggttatcaatctctgttttaaatatttcataaattctatagcttcagtttcactgttggtacataaattgagtttaatagatgcaagtaaataccagattgaagcagcaccttgtcattttctcactttgaagttgcaagtgatatggaaataaaaccttgatggtgtcattttctctgtctgcagaaagcttcagcacagcaaaactgaaatgaggcaaacccaaatgaggtcctttaagcctcatttttgtttttctgtagctctggtatttggattgatgtttggaaacttgaaaatgttgcttttttttcttcattgtagccattttgtcatcttaatactagaattttaaaggcagtactagttcatgttttaatcgtgagggagacttaagatagcatttgagtttgattctcaaaattttctcctacttcattacgagaaaatattgtttgatgactagtgaagttttaaaatcctaactattctttacccagtaatccttagagtaactggtttgtgctttgctcttaggtatttatagaatatcgtgaaggaggtgtgtgatgcaaatgttgcctgctggcaccacctgtgtttcttttactactgtggtgtatgcatttgtatctaaatagtaagaccaatgtatcacaaaatattagaatcccctaagagagtacaagctgaagaaagattttaaaaggaaattttacagttggaaaaatagtcatttcttagttatgggagtataaagaaaggatcatgtaagtgttaacactttttgttgttctgaatcctgctaagcctttgatgttagccttgattaacagatgctgggaagttgcagagcagagtactgaagagggtaagctcatcagaaaacaagctcaaaaagatctataggaagactcccggagttttacgcaagtaataagatgtgtatatgtaggattaaatgcacaaggtcaggcaaagtagttggagcaaatgtgtaccaaggagttctcagttcacacagggctgcaaggggttcacgtttctagcttaaggctgtctagatcctccttaacaaatcttaaaaacaagccttgaagggaaaagaactaagctgcaagtaacttagtagccacaaaggaaaacaaaatggatacattcaaccaaacaatgggtgcagaaaaatgtctgataggaacagacccagaagtgatgaaattagcagacaagcatgttgaaaaaaatgttataactatgcttatgtgaacatagcgaagagaatataagaagacatttaaagtgaaaatgtcatttgatggaattaatggcagaagaaaagatcagtgaacttgaatacatagcaataaaatgtatccaaaataaagcaaggagagaagaaacatatttaaaataaaaatgaacatatccacagtagcttatggggaaataccaagcactctagcctagtccttggaagaagctgagggaggaatagggtaaggtgaggcaatgcaacaggaagtatatttgatacaagctacacatcgaagaaactcaattaacccgaagaaggataagctcaaaacaccaaaacatgccaaactaacagtgataactttttaaaattttaacataagccagagtaaaatgaaacatcatgtagagaagaacaaagaaataaccttagaatattcatcaaaaactggccgggcgtgattgctcatgcctgtaatcctagcactttgagaggccgaggcaggcagattgcctgagctcaggagttcgagacaggcctgggcaacatggcgaaatcccatctctactcaaaatacaaaaaattagctggacgtggtagcacgcacctgtaatcccggctattcgggaggccgaggcacaagaattgtttcaacccaggaggcagaggttgcagtgagctgagattgcaccactgcattccagcctgggcaacagagcaagactctgtctagaaggaaaaaaaagaatattcatcaaaaactgtgtaggaaagatgattaattgaatgacattttgaagtattgaaactggcaacctagattctgcatctacaagaaatatgttctttaatgaaactaaatgaagactttttcaggagaaaaatgctgaacaaatttattttcagcagactggaaayataagacatgtattaaagtaagttcaagaggaaacaaaatgtcaccaaatggaaacttggatcttaacaaagcagtggaaaatgccagaaatggtaaatgtgtgatcacattaaaaagctttattttttcatttcttaatttcttaaatgatcattgactaaagcaaaataatgtttttaggcttaaaacatatggagaagtaaaatatatggcaatgataaccaaggaaattaatgataaaatagaaatatttaatgtattgtaaagtttttacactgtatgtgaagcagttaagtatgtacattgtaaaccctaaagcaacagctaatgaatttaaaattaaaccacaaactatagctaataatttactggtggagacagaatggaatcctgaaaaaagtacccaattcaaaagaagataggggccaggcgtggtggttcatgcctgtaatcccagcacattgggaggccaaggcagcaggatcgctgaggccaagagtttgagaccagcctggggaacaaagcaagaccctgtctctaaagaaaaaaaaatttttttaattagccaagtgtggtggcacataactgtagtctgagctacacaggaggctgaggcaggaggattgcttaagcccaggaggtccaggctgtggtgagctatgattgcattactatacttcagcctgggtgcagagcaaggtcctatttctaaaaaaaaattaaatttttttaaagaagaagatggggaaaaggacacaaacaggtgaacaaatagaaaacaaatggtgagatgatagacttaaattcacgcttaaatagactgataattacattaaacataaaggatctggaaaatgccaattaaaaggcagaaatagactgaataaaactaaatgctgcctccaggaaacacactttaaatataaaggcactgaaattccggtcccaggtaatgtgataacagcacattctatccaatttttcccgccaaatgtagctataaaaccagagtatatggagcagccatcaagatctctgaaaagtaatagcaaataattgggaggagaagaccggaattctaagtaccagcaaacttgtggtaaatttatgttttcttccaatatcccccagcctggaatccagatagcctgaaacctaggcagggatcagcacagacagcgagagctcctggaggagcaatgaatgattgaacttgtgatttaaaaaacaataccatttacagcagcatcaagaaaaattaaaaccttaggaataaatttaacaaaatatatgcaaaacttgtatatttaaaactatagaacattgctcagagaaattaaagaaaacttaaataatggagagatatactctgaattggaacacttaatactgttacagtgttacttcttcatagaagaatttcctttattaattcagtgcaatctcagtcaaaatctcagttttgtagaaattaatgggctaattctaaaagttatatagaaatcaaaagcctagaataaccaaaataattgagaaagaactacattggaatctttatgctgtgttatttctaaacttaccaaaaggttatattaatctaggcagtatagtagtggtgtttattgtagccatgtaagtcagtataacaaataatccagaaatagacctgctcttgtataattaaatttttacaaaggggcagtgttgattaatggggaaagggtgatcttttgaaatggtgctagaacaagtaaatatttgtttgagaaaatcattcttcacaccatatccaaaaactaacatacataaaaactaagtggatcatagrtacaaatctaaaagcttagactgtaaaacttctggaagaaataatatttgagactttggagtggtttatgaaactaagatagtggcaacattcgaacacattttatgtaagtaacaccgtaaagttagttttaaacttctcactggacagtcaatatcttcaggataaaatacaaactcchatgtccctttgcagtctgactctggtttttcatcatttcmaaccccatcctttcacaaccccaggtaagctcatgtactccagttgtacagattgctcatttttaagctaacttttatttttcttgcttttgtccaagatgtttttctacctagaaggttgttttgacctctttcacttgataaattccaatttacccttcatgacatagctaatttctgtaaaatttaaatgtcttcagagctaattgttccctttcttgattccccagataaattcatatacacatttgttacaacatcttagtgtactggagttctaatagaagttcaacatcttagtgtgcctccctcattccttcttgatgtgatgtagtatttgacatactgtgctgaataaatgaataagtacaataatatatattgtcattgaaatccaattttctccatcaccttgggtaacactatgccaaggtcatctagtgtccatatttggatggccaattttgccaactctggtgttaccagaaatttcatcatactattgcacttgagcaggttaatattcaaacttaccttggtgtggctgaaaaagagttctctatagttatattgaaactaaaagtagcttttgacccaatgtactataagatttttagataaaaataaatgaagctatgagtctagtttggaaaaattactgtatgtaaagcttattttagtgtccagaaggtaatatgacaagataagtaaaatattgtaaatggaactatagagttattttgcctagatgaggacacttaaagtttgaattcagggtgggttttccctttacaattcatgtacagttttattgtamaaacttttattgtaagtaaatatggcagtactttaaaattcaaatctttttaatgtgatttggctttgaaaatataaaatcaggctatttctctttatttatccatacagtacatagtaagcttttatatgatagataatctgggatttttttctttcatttttaaactctaagctttgacaacaattaataatgatttgttgtgtttttctttcctttttctggggaaatgaagtttcattgctccggaagaaattaattctaaaaaatacactgtaacaattaaaatgaagtcaattttgttcttgaactacggcactgctttgtggtatactaacagccgtctgctgatgataaaaaacaagtccatgcggctcagctccagagtgttccttccagctctcaccacagtgcacacacttaacaacatcagtcattttatatctatttgacactgattaattactctgattcattctggtattatagccactgccttggcactttagttaggtctgaacaattgaagggagatcagcagtgtgaattatgtatttattactgtgacccttcatgctacttaattaacttaaatgattgtgtgtgcaccctcatctttgaaatatgattatggaaaagatttacctgtatttcattttaagaagtgaaaatcatggttatcagcatcagcttatatatatgacattatgttaatttttcagctgctatattgatgcttagcattttttcttttgtgaaaaattaacaaatatccattactaattcattttgactggggytttttatttctaaactgaggaatgcatagaactcttataggtacatcctttgatcctgaaatgaagatgataaccagatttataagcactatggaacatttctattttgacttgcactaaggattgaataggacttctataaacaagacagcttacatatttttaacactcaaaaggcaatgtaaatgaaagagcagcaaccatcagaacaaatgtacaaaaatgaaatatttactagcaatacctcatatgcttcaatgagaaaagaagtaaggtaaatgcaccagattttttagatggtagttaaataaatagtacttatctcctctgatttgaaatacaaatcagagcaatcacgttttggttgttgtttttcatttactcttttgttgatgaagatggcaggaatgtaacactggaatatatttcataccttttatgaaggaattatacttctgataatccatcctaaagaatcaattcaaaattcagacttaaaaaatacttgttacacaaagacactgctttaatttgcttttctttctttaaactatcttgctttatagaattttttttcattttttatagtcacatctgtcaaccttttgcttttggtgtctggctttggtttcatcctttaaaagattatattactacttttgtacaatgtattgaatcctttcctcagtgacttaaaatgctccacttactatgtactgagtcttcataattgatcttatttctctcatttgtctgtgtttattcctaggcaccacatttttaaacaaataatttacatataatcaaaattcacacattttgattgtacagctcattgagttttgaaaattacatataccactgtggaaatatagattatttccatcactccaaaaagtttcttctgcaattccctgtatggtcagtccccaaccgtgattcccagaccaagacagtcactgatatgctttgtcattatatgttagtattacctttttagaatttttatcaatggaattatacagcatgtactctagctttcttggcattttttttttttgagattcgtctatcattaggttgttcctttttattgccaagtaatattcctttggctatgccacagtttacttaggtattcacctgctgctagacttttgtattgctttcagttaggggccattaagaataaagttgctatgaatattcatgtaaaagtcttggtgcagacagatgttttcatttctcttgggtaagtacctagaagtggaattactgggtcttatggtaagtgtatatttaactttataagaaactggcaaattttttaaaaatgactatgctatctaacatccctagggctaacaccattgtgaattcagttgttccacatcatttttaacacttataaaaaagatgcagtattttaagccgttttgagtatgtagttatagctgtgcttgtagttttcatttgcctgatgtgatgttgggcattgtttcatatgtgtattggccatttttatatcttcttgtgagatttctgctcagatattttgcttgatttcaaattgggtggtcatctaattgagttaaatttaaaagttaataatagttcatcttttcccaaatgtatattcacttgctccatcatcatttcttaaaaagactatccttttccgatttaatcgccttggctcccttgtcaaaaattaattgaccatatgcatatagatctacttctgagctctcattttcccccagggatctgtatgtctgtccttgtgcctttaagacagtctttataagattgaaaaagaacaaaatggcaagatttacacaaacagttgttttggctattctaggtcctttatattgccatataaattttaaaatcagctcattaatttctggcctaagaaagcctgttaggattttgactgggattttgttaaatcaatagattagggaaaattgacatcttaacaacattgagtctttcactcacgagagagtgggtctctccatttatgtggaccatctttaaagttgttttgtagtttatgtaagtcagacatatattgttacatttatctcaagtattgtgtgtgtgtgtgtgtgtgtgtgtgagagagagagagagagagagagagagagagagcgagagcgactgagactcggtctgtcgcccaggctggagtgcagtggcatgatctctgcttactgcaactgccacctcctgggttcaggccatccttgtgcctcagcctcccaagtaactgagactacaggtgtgcaccacatgcctggctaatttttgtgtttttagtagagacagagttttgccaggttggccaggctggtctcgaattccttgtctcaagtgatccgcccaccttggcctcccaaggtgctggtattacaggcatgagccaccacacccagcctttatgcttttttgaagctgttgtttgtagtattatataaattcttcattgctagtacgtagaaatagaatttttataccttgatcctaaatcataagaccttgcttaaacttcaataaatagttctagtagccttctttgcatatagcttcaggattttctatgtataaaaccaggtagtatgcaaatgaaaactttaattccccctcccccagtctgtatcctttttccctccacactttaatgtcctgactaggacatctaatagaatacttactttatgttgggtctctggaggtcattttgttatttttgaatctcaagtgtccattatctgtcttttcatatgtgaactactttataccagcaactaaattaagtaatttgtataagacatactgcttgtaagtaaaaaggaactaacaagccactgtgttgtaaaaatcaagtttgttgattcagtgttggcaattcaataacagtaagttaaacccaataaccaagttggcaattactattctctgtcatgtatttacaaaaacattgtcagtttatcataatgtggctgttcgttcccagttttggtgtcaataaataacttaaatagaagtttttaaatgttgatttaaaaagaagcaaataaaatagccaaaatagaaaagtcaaaataggaaaatcttaaatgtgttcaatatactaatgatcttttatttcttccttaggttaatgccttagataagaaaacrtgtatcattgttcattagttattatagaataatagttacatcaacttacatatcaattgtgtttataaacaagtaaatatttttaccaaaaaaaaaaacaaaacccacggggcggtaaaatttaggtctatttcttattcattatagtatatttaaagctataatcatcatttttttagatagagatagggaagcaccagagtatagttgaggaacttgggttctggaatcaaactgccttgctgaaaatcctagttctttcactagctggcagatgaccttgggcaaattacttaccttttctgaacttcatctgtgagtaaggaaaatgcgcttacctcatagcaatattttgtgaccattaagtgagataaatcatgtaaagaccttagagtagagcytagcacaaagtaagtgttgaataaatataagcatraattatctaatgattawcctgaactccataaagtttgtagaactatctgactggtaatctttattatgtccactattggtgaacatgtcatatgagatagttttatatcattttcttaatatagaggaataggtcagatataaaagctaaagccaaatatacacattaacatatatacctacacaaaaattgttatattttgttgaatggattgcaccttgggccacattatttcttctattatttaactccttaattatgtgttaaactgtgagtctcaccttttttgcaaagatgtagagaaggtatcagtaatggaatctttatattctgaaaataaatataacaggtggttatgttttacttgtgttatttcactaccatcttgaaaagcattcagataattttccttgaatatggggaatttgtatttttttaaatacgatattcattcagtacttcaatagttttatgtagatttccttggtcattatatggagcctcattgtgtccatgcagatgctaaagctattcctgacactgtttggtgttatcttaatattatttaagcaaagaatggtgatcaactacaacttagcaatttgttactttttaaacagctctttaaaataaatgaaaaattaaatgagaagtatttataattagaaaagtacatagataaaaatttggaacctacagaatttaggaaatcagcctttgcacaggtaagtaatttttgtgtgttcactgtttcacatgggtacattgtttcccttttacagcaccagtgcatcaatggccaatggctttgtcatgtgcctctacattttcccagctataattttcagttcctcaaaatgccattcctgaaggttctgtgtatgtgttttccttaaataccattacatgtacatcccttaagcctggttctccatgacttcagccctggcattgggtaattcattaattcttgtgaaaccttgcctttaactgccttccaaccatccccagtgctcacctccagcacactttagacacatgcctattgtgtaattgttagtatagcttttttcttcaccctgatcacaaactctttgagggcagggaccatatcttttttctagatgcccagaacccaccatagggcctcatatttagaagttcagtaaaatgcttccattgaccctttatgaccacaatagttttactcactttcacaaggatttgacactgtggtatgtagttagttctcgcttcattcaaaaattaatgaaacagggctgggcgcagtggcttacgcctgtaatcccagcactttgggaggctgaggtaggtgagcgcatcacctgaggtcaggagttctagaccagcctggccaaaatggcaaaaccttgtctctactaaaaatacaaaattagcaggtcatggtggcgcatgcctgtaatcccagctacttgggaggctgaggcaggagaaatcacttgaacacgggaggcagaggttgcagtcaactgggattgtaccactgcactctagcctgggcaacagagagagactgtcttaaaaaaaaaattaatgaacataatgctgctctaaaaaatgaatattggctgggcacaatggctcattcctgtattcccagcactttgggaggctgaggcgggtggatcacctgaggtcaggagttcgagaccagcctggccaacatggtgaaaccccatctctactaaaaataaaaaattagctgggcatggtggcatgcgcctgtagtcccagctattcgggaagctgaggcaggaaaatctcttgaacccaggaggcggaggttgcagtgagccaagcttgcaccagtgcactccagcctgggagaatgcagtgagctgagatcacaccaccgcactccagcctgggtgacagagtgagactccatcttaaaaaaaaaaaaaaaaaaaaagaatattaactttaaataaagtttaaaaagtgggaaaacatcacaataaaaagaagtgctagttatacattgtttacttttctgctacactgtattccttgaattcttaacaatttttgcctttgttttacaggtgaagccttgaaaggaaaggtcacagttcacaagaataagaaagatccacgttctctcaccgtgaccctcacgttgaataattcaactcaaacttatggtctccagtgaaacagccataaaagcacactaccttgtagtttttaatgtgggggtagagtgggtcagcaggagggagctggttttatgtgagcagatggatggatgatggaccctttcctaatgagcctcctcaataagagagaagttctcattgtgggaatctgacatagttcagctgaggaagagaatcagctgatcctcatggtctgccacgtaatcattttcttagacgtttgctccaccagatttaaccaaatgtaactcccacattgagtttatctatattgaaaatcatttacattggcctatatttggaagagagatagtcttttgtttttaataagtttcttactataaattttaaacaaattggttagttatttggatattttattaaactagtaacacaggtactacacattttattatggactcctctgaggaggagtttttaattgtatttgctagaaaatcaggatgtaataaagatttgtataaaaaaactaaaatatggaaaagagcttcagccttcatatacaaatcatatatgcagacagcctagttgattatctagcatacttagggttctcattttgtagtttcttccctctttgtgactattccttagccttatagatttctagtactgcccaggaaatctaatttcaatacatttatcctaggtttcatgaaagtttttaaagattgggataaatatgtacttatttactaacgtattatctttttcaaaccagatttatgtgcaaaggttaaacatgtaactgttactaagcagtctataaagttgtcatttacaattactgattcaatttgaaatgtagaataaaattttaataaaatgtatccttataaaatattttaaaaatattgatattataaaagttttcaataaaatatatcaaacaacattataaaatatttcaacagggtatggtagctcatacctataatcccagcatttgggaggccaaggcaggaagatcacttaagcccaggagtttgagagcagcctaggcaacacaggtctgtacaaaaaattcttttaaaaaaattagccaggcatagtggtgcatgcctgtagtcctaactacttgggaagctgtggtgagcagattgcttgagtccaggagttggaaactacagtaagtcaagatcgtgccactgcactccagcctgggtaacagagaaagactctgtctctagaaaagttaattaattaaaagtaaaaaatagggccaggcatggtggttcatgcttataatcacaacactttgggaggccaaggcaggaggattgtttaaggtcaggagttcaaggccagcctgggcaacatagggagactccatctttacaaaaaattagccaggtgtggcacacacctgtagtcccggctactctggaggctgaggcaggaggatcccttgagtccaggaggtcaaggccacaatgatcacaccactgcattccagcctgggtggcagggttaggcctcatcattcatttattcactcataaatagataagtttcaacatactaaggccttttgtaaaatcagaagcatttaaaacaagtcttaacaaagggattatttttaagaaaataaggcttttaaggagaggcattccacatgcctcttttaagttcagcagttggttctttgtcaaaacaagacatatacgaggcagcttagcatagtgttgacaagcatggagcatagtattgagaagcatgatagctatggagtcagtgcctaggttcaaatcctagctccagctcttacttgctgtatgatcttagtagctttccttaacttctgtctccctccatgaacgtgccaatttatgaattaataaagaatttagatcagtacctggcacatagaaaactattaggtgatagaatcatcattatccattcaaggactcccaaagaatatatggcacctacattagatcagtttaagaattgtcacattcatcggatagtaattattgccctagtacatgaatgcgtgagaaaattatgatgggcattaatatttaaagtggcaaaatctgtttcaacaagaaattgtctttggtctcagaaaactggcctagcaatgaggaggaaaaacctcttcaaatgttggttttaagaccatagtctttagtcttccttcacaaacatgattcgctttcattgggctaaaccagtcagcttgttttcactatggatttgaattcagaccattactagaaatgtatggtgctgataatacagtttaaactacttgcaattttgtcttgaatggcttcctacacaaatttgaggttagggtgataaataaggaggccaaaaagaagatttaatgaatttttaaagtaaccaaaaactatcggattttttgttttctctctcattgtaagtgcatattaaatatttcctattgtataaacttcttaattatttctcttcagaactcttgttaggtttccatcagatttgcacctggtgacactttattctcttcaggttattactagcccagctgcagttagtggatctttgtttgtttcaattagccttccaaggccaggacattcttatttgtgtacccaagcattttatgagaacataagtgtccaaatgttagctcttcaattagaatttccaccttcaaattgctgtaaaaaataagtactttgtaccccttgacaatgataaatacactatgcttttatgttgtgacagatgggcatctatagataccagtttactctgtttcagggattttatttccattaagaaaacacatttttcctctacctttctttgtgatattgtgtattgtaatgtgtggggctcatctcaatatgatggtcatctatagcgaaacagtgtggtctgaagatagcacttcagaaggaatgttccaaggaaacagacctctcaagtgtgtacagaatggtccaataagtagccataatggctatagagcacactccgtgattaatcaggcagctgtttaactttgaaacaatccctgtttgggttagggaggagtgagaagtctggtcctacagagttttttgttgttgttttttaaatcacttaatgtggattaatcagtgtagtccacctgtgtccttcagcattctacctcactttttatgatgatgtaaaatataacgtgtgatattatggacttgagatcagtccataggagtcttaccagacatgctctcaagctttcaacaggagaaattaaaacaatatgatatgccactttgcttttagtgactgtgccaaaaatcataatttaagctgctgggctgtaacatgtacccaaaatatcgaggtattcagatttttctgtgtagcagaataacaaaaacatgtcaggtttgcaacactgtcatagagtttcagccacactttaaattatttgcaaaaacaaatagtataaatagtatagcataaagtttttaaactatttcactccttcgagagaaactaacttgtggtgaaagaccagataggtgagatacccaaggtcaagccctgtccaatgcagggttagcaaactgcagccccggggccaaacccacctgccccctgttttgggaaataaaattttattgaacacagccacacttaattcatttttatactatctgtagctgcttttgtactatcatggcagagttgagtaactgtgacagactgtgtggcccacaaggctgaaaatacttaaccagctgtccctttacagagaaagttttccaactcctggccctgtaaggcttgtagtgatagcaaggtacatatttgctcttacagctgagagtgaggtgatgataatagagaagtcaattctgagtcaaacaaatttaggtaagatttattatctgaggccgggcacagtagctcacgcctgtagtcccagcagtttgggaggccgaggcgggtggatcgcctgaggtcagtagttcgagaccagcctgaacaacatggtaaaaccctgtctctactaaaaatacaaaattagctgggtgtggtggcgcatgcctgtaatcccagctactcaggaggctgaggcaggagaatggcttgaacccgggaggcggagggtgcagtgagctgagatcatgccactacactccagcctgggcaacaagagcaaaactctgtctaaaaaaataaataaataatctgtatagaaaacctactcagatgaagtaataaatttgtttttagttgcagccaagaaagaacagctaccttttggagcagagatgactaataccatatataaagtatttcttcacataactcattaatggtcatggcagagaagatataaatgcacaacagaacacatagattttaagaactattttttttaatgtggagctaagcaactggatatattactccatttatgaacacaggattgattaaacctaaattgctaaaaaagatacagcatttacatacatgaaactgatgttttgagttgtaacaattagtgccttgtataaagggaattagtaaaactgaaaccttgtagctgattgtcaactccattttaaaagttttaattagaccagaagaaatctgcaaacagaacttttgtttgcttgtggttttgttttgaaatagggtctcactctgtcacccaggctggagtacagtggcgctatctcggcccactgcatccttgacctcccagggctcagttgatcctcccacctcagcctccctaatagctgggactacaggcacatgccaccacacctgggtaatttttctattttttatagagatggggcttcaccgcgttgcccaggctggcctccaactccaaagctcaagggatctgcccacctcagcctcccaaagtgctgggattgcaggtgtgagccagcgctcccagcctaaacagaacattttaaagctagagatggttgacccctgcccttgagctacaaaataacccagctagtgaatgacttctgagccttaaagaaagtaattgcagtggtcttcaagatagctctggacccaaaactatcaacattaggagagacagttggggaactcagcagttttaacaagtcttgggattccttaatgccttccctgcttggatgtcacccaagaacatggcactactgttgtagtgatgcatggggccatggcaagatatgtaaagtgcctgcacagctatccacacacgctttgttggcttggaggctcgtcggtcttaagtctcttcatgattttgagtgtttcgttgctataaagttagagtaaactttttcaagaagaatgatagaagaaacacttctaaaatatcttagtaattcatggacagaaaaccaaacgccgcatgttctcactcataggtgggaattgaacaatgagaacacttggacacagggtggggaacaccacacaccagggcctgtcgtggggtggggggtggggggagggatagcattaggagatacacctaatgtaaattatgagttaatgggtgcagcacaccaacatggcacatgtatacatatgtaacaaacctacaggttgtgcacacgtaccctagaacttaaagtataataataaaaaaaaaacttagtaattcatttgacctttccaataaagttttcatctattgtctcaccatcctggttaatgtggagctgttcacattgttagttctacagtgtagctaaatgcagacaaaaatgttgccacttagttgtaattaaaatgaagataatagataacaaaggaggcaattaattatagcatagtcattttatggaatattatgcattcaagaaaaatcagtatcacgtcctcaaggcagcatggaaaagctcatgataaaaagataaagcaatataaggttacactgattaaaagaaaaagcctacacatgctaaaatgctgaaagaaaaaagtgtcagtgattggattataagtggctttttcctctaaactttctgtaatgttgtataacttttgtaagtttttaaaatatattcttaaacaaaactgagtagctgaaatcattttgcaaagtgttgatataagaaatgaacccaccaggccaccgcatcagcttagatggaatgtggaagcccaagaattctgcactctggcaaaacgcaaccctccatctctgccgacaatcccaggttggaaaacattgtttggagaccatcaggactaatttcatgataccctttattcctattaatgccaatcactccaagaagcccaggtctcacagttcattctgcatcctccatttctaatcttcatgcagtgccaatatatccccattttctaaataaaatcctgagatcactgccaagatcactgcttcccctgaagccttctaaaatgggagctatcttctcgcacaccactcatcgccctagacttggctgtaaggtgggagacttcttgtttttggttgccaatcatagaccattctccttacttctactgcttttacatctttaatcacctgtcatcaagactgttaacaccaaccacctaaccttgtcagcatcatcacaccacccccaggtcactcacctcattcctgttttctttccattgttttgcctttaatttatatacaataaattgcacacattttaattgcatactatgatgagttttggcaaatgtatacgcccttgcaactgtcacgtctctcacctccttaaaaatgttagcccctaactcactgcccacactgctcctgcctaatcagagtcagtatcatcacatggatgatcctttattccctgaccttttggttcattggcctcctccagtgatcttgcctccacctgacctcagct

SEQ ID NO: 95252 - DNA, 50326 bp, Homo sapiens
agggtcagtttcctcatctgtagaaggaaataatagtgctatttacatcacagagttatgaagagtacatgagaggatacgtatcaaatatttagcatagcacgtagcacaaaatacagatacagttcattcagtacttactggtggcatcatcatcaccatcttcatccttgcccctcattctggagacagttggggttatcttggtacgtttctttctgttggttttctgtgcagtttgttgtagttgagatcactctgtatgtgcaactttgctaccatgttttcatttcacattatatcagatgctttccctcatgccattaactctttatagacatgatttttagcagctccataatagtccatcatgtgaatgtaacataatttattgaaccatttccctgatgtttagacatacagattatttctaggcttttgctgttataaataattctgcagtatacaccttgcatacatctgggtccccatctctgattatgtccccaatatggattcctagaaatggaattattaagtcagatgggaggaatgtttttaagattattgatggatgttgtcaaattactttcctgaaaagtacagtcaatccatggcagatttaatgagtaatcacacggcgatgcagtttggagcagatcgcctgtccctcccgttaagggtagaggagagggctcctcgagtctcttcccagccctgagaggtggcagagagcccactgtccctgctgccttccctggggcacttcaccggcagcactggtgacagtccctgcgtcaggcaggaggacattcccaggggagctaaggcacgtggtttctcaggccctgtgtttccatctgaccccttggtgaactctgatttggacttcccccctggctcagcacatcctacagggtcactcacctgtgccatcagttcccagcctgaagggcactaggtgagtgggcgaccccaggcagaggaggggattcaggagaccacaccttgttctcctgtgttcattaatgatgtccctggctattctctggcctgaatgatcatttcactaatttattttttttttaatattattattttttgagacagggtctcactttgtcacccaggctagagtgcagcggcacaagcacagctcactgcagcctcgacctcctgggctcaagcgatcctctcatctcagccccccaaatagctgggactacaggtgtgtgctaccacacccggctaattattttgtatattttgtagagacagggttttgctatgttgcccaggatggtctcgaactcctgagctcaagcaatccacctacctcagcctcccaaagtgctaggattacaggcgtaagccaccacactagcccagttcactaatttatggcatatgtgtatagtaaagttacacaaagcttttttacatatattttgcccccacgctaactggagggtagtccatccatccaataatgatttattgttgagcctcctgctctgagccaaggcagtgcccgggtactaggagaggcccctggcactcacggagcttctcggctgtgccctttccttccttcggaggtgagagctgcccaggcagaccaaggctgggagagtggtgatgcttgctgtcttttccccaggtctggtctctgatccagctggcgcgcagatacctgcagaagggctacaccacgctgctgttccrggagggggatttctactgctcctacttcctgtggttcgagaatgacatggtaggtgaggctgagtccctgggccaggacgggccacacacacttcccgctctgtaactcttggattcctttcttctgaattgttgtctgtctgtctcatcttctcttcttgttgctggtaagcccagcaggttgggagccagagttcagaggtcacattttcacatgggcgtttaactgctttgtgatccctctgcccagctgtctggcaaactcttgccattgtccacgtggcatccaggcacacatgtgagcagaaaggcacatgccccactgtgagaaatgcgactcagaccacacactttgtcgctagtgcttccatgtcgccagcgtcacatgccaagtgtggcacatggtcatccctgtggcataggcccctgaactcaagagcataggcccctgcttgaagcagtgagccaggctgcctgaggagacactggtggtgtggctcggggccctggcctccaggccctgcactgcttcttctgggcctcactgttactgcagagtagggtccagtggggggagcttactatcattgtgtctccatccatacaacggggtcagggatccctgccccagccactgcacagggctgtgaggggtgcagtggctgggactcctctcctcctgtctctccctcctctctgtcttttccctttcttcgctttcctcctgtttctcttttatttgcatctcgcttgtcaccataagtggttgttccagctctcaggagtggttgttccagctctcaggagtgttcctcctccctcgcagcccttggtctctgggtccctgcactcctgtgccttcccctgcccccaccctgcactctttgttcactgagggtgacagccatccctttccatagggcagggcggttactggggctctccaccactgttctctcagttaccccctcacagccctgtaaagtggctggggcagggattcctgaccccgttgtacggatggagacacaatgatccggagatcagacgccatggccagggccaccgaggctgtaagtgaggaagccggagcccaagctctgctcccccggcctgcaggctcccagctttcctccgtgccctcagaagtgcccaggacgtgtgtacaacagaagtgctagaaaattcctgtgacctttaccttcacttctagggagggacaggagtctgtgtgcttgggtggccccgtggggtgataaagtgaggcagagctgtgggctggagaggccaggtttgaatgccagccacacagcccagccggtgccgtgggggcagccctgcacactagggagtccactccccctgcagggcaggccacggtgcccaggcaagcatcagctaagtgccatgttcatgcctggcacacacggcacgtccagcagatcttaattcccttccccaccttatcccaccctgggaattcccaattctttcagagcagaggcttgggccttttgtgaatgctctgctcttcaagacctgtatgacagccctgcagggtgccctcctgagcgtgtgtttgtggcctgtacaggtccaggtattgacggtaatgagagctaccctgccggcccttgaagctttgtatactttttctctaatgttcataaggtgactgttgtcattctgacttcaaagatgaaaaaacaaggtccaggcattttcccaagcacccagcgcacatgacagagccaagccaggccgcaagcccggtgcgtctgactcaggcccttgcactacccccacacccactgcctccctgtcctccctcctcaggggtacaaactccagatgatcgaggtgcccgtcctctccgacgactcagtgcctatcggcatgctgggaggagactactacaggtgacgctgcgttgggagccactggggacagatgcccccatttgggtgataagtgctcgcctctgccgggagcagcttctgcttcagcagtgccctacctcagacccagaaatccacgctgggaacaccttcccggctggccctgtgtgcagcgagggaggacgggtgtggagggtacatctgtgttcctaccaccttcctgctggcatggtcttggcagcacggggaacgtctgtgcccggcccagaacatccccactgctacctcgtagccaggatgccactgttaggtcagtgaggaaccggagcggttgtcaaggcccacatgcaggggcctagtgagatgaccgagggcatgggcatttgcttgcgagggcccagagaggcctctggcgctggaggagtgccacagcctcactcctgaatcccatcctccccttcctccccaggaagctcctgcgctactacagcaagaaccgcccaaccgaggctgtcaggtgctackagctgctggccctgcacctgtctgtcatccccactgacctgctggtgcagcaggccggccagctggccyggcgcctctgggaggcctcccgtatccccctgctctaggccaaggtggccgcagtctgcctttgcatcctgtcctccagccacccttgcttgccactgttccccatgacgagagcctcctgtctgcagtggccatcctgaggatagggcagagtgcccagggtggccccagggcttctaaaaccccacctagaccaccctccatgtcaggtactgagcaaggccccagatccttctctctggaggaagagggaagcccaggggtcctgtttgtaaaacaacggtggcaacagctcctcttccagagctgcctctgcctttatcctgggagatggggaggaagccccatctctgctgttccctgcgtggaggaagcccacccagcaagctctctcctaccccaggtaaaaggtgctcctttgcctgggtttgaattccagcgctgccacttcctctctgcacctcctggcaagtttcttctattccccacgtttaaagcgatggcacctccgtcccagggtggtgtgaggattacccagtgtggtaggtgctcaataaatgttggtcattgttatcactgaagcccaacatgctagtgcttctagacccttctgtcagtgctgataagcccttgctaagtcccagccccttcatgcttggctggcgtctgccctagggctggggttctcaagcccctggccctggcccagagatttggattcccttggcggcygtggagcccagcctttgatgtctttcaaagcttctgtggtgcgccctggattgagaaccaccacccgaggggtacagcccctctcttccaaccgagaagttcctgtcccagaatggacccagggacaagagaccctgagagccctgggactgggagtgtctgctcctctgaggccaggaggccggtgctgggccagagaggacggcgtggcgaaagtcagcgtccactgcagcacaggatcagatggccgtgtgctgtgcatgcaggagcctcgccttctgtgtctttagtcttgagccaaaatttgctcaaagactgatctcttccttgcagggaacagctttggggctgggggaactagaacccacatgttggtctaaaccctgagaaggtggcagtgaggaagtatcccctcaggtgactggatctgtgttcctccttaacatcatctgatggaatggcaatgaaaagcgtggattgtggaaaatacagaaaaacataaaggaaaaaactccaatcccctgagcccaccactgttcaggacccctgcttttgtcacctactatttccctttagtttttagcagcggctggatgtgatatgtctagtttaaccagtccccttgatctttctatataataaataacacaggagtgaacatcctgaatcagatcttagcagagatgctcacatgcggggtaactgtccatggtgtgtggaggggtcctcggaaccccctcttaggatcatctccacatactctcccagttctgagattcgttaccaatagcaggtttccgtcacactgcgatatcagagcagtgcaggaactctccgctccaaggggttttttcctcctaggggaacactctgctaagtaatgggcagagaacaaaggggctcctaattcaaggcaggcctaagggagggtcagaaagaactttagctggaggtatttacagatgtgacctcraatccttggggattcttggaaaatgggcaaggtgccaaaagaggagaactggccaggccttcaaaactaaaacaccagagaattacagacagcgaacttgcccctaagccctcgttgwgggtktgtgtttgagcatttaggagaggactccagtgctcctcagcgacagacacagctgcctctgcggtgtctgaaggccctggtcgtggtgacgctagatggccgccctgggcgcctcctgtgggcgtagaggcatcaccactctgcactggcagactcagcatggagttggagcagagtctgacacgagcacttgccatcccaggcgtttcagttctgactgagaaggtagatgcacaggggaggagagggccctttyragctccrctctgcctccaccactcattccctaaccccgcagcctcagcgccctcayctgtaaaatggggagttttgcctacagggttcagcacaatgccagcctgacataggaaccccagtggattgtcagttttgccattatcccctgcatcctggaggtgacaccgcctggttaataggcaacactcccracggcccagcacagccccaggrcagcaggaggctggcctgtggccaagaatgcatggtggagggggcctggagggggactgcagctcctcctcttcctgcttcctccctgctccaccccgtgcctagggcagcacaaaagccaatcgctagcaaactcsctgcctagcaaggcccagcctggggcagaaatggctgcaagtggccgaggtctctgcaaggctgtggccgcctctcccttcccggcgtggagacgagataacayggaagccaggggaggtctgaagcctgagtatgatgcggtggtgataggagcaggtaaagtggtaaagcaggccgggccagagctgaggggcgggaagrcagccctgctcagagcttggtggggagggggagggggagccaagccccactgctctctcctctggcataacccagccagaagtttatacgctagcaggggctgcaatggaaagcccttccatctggcaggcaggcacctgggattccggtgctggctctkctgtgtggcctggggcaaatgcttgccttctctgggcttggatcttcccatggagaatgacaggaagactaggtgagctcaggggtttccctatatctcttgcaaagtgacctagtttccaccacattctcagcctatggtttgtaagggttggaaagagccctgggccaacagacaagtgaaatccagcaccccgccccctcagtgccctgagttctggtcaccactaccttaccactgaggccacccctcgtcacaagaaactgcagtcatttcataaaggccagttaggataaaacagaactgagtcccagagttcctactgcgtgtctgcagagggagatggaccccattgccttgcagctctgggacatttggggatctgcagtgatctgccacactttgccaacccctgggctcagagtatcacagtctactgggtgctaggggaagaggcaggcccaggaccaggtggtctttccttagtgccttcctttcacacttgcagagggccccaaatgcatgattgccaactgggtctatacagagataatgacgggaccgaaagcagacggcactcaacatgcagctttgagggcatgccttcattttcatatgtactagagcagttgcgagctggtagatactcaacactcacctctccagggaaaaatgtgtgatgtatgtgtgtgtgtacatgtatatatatgtatatatacacacatatatgtgtatatatatgtatatgtgttacrtacatatatatacacatatacacatgcttattttaartattgaaataaaagatacactgcacacaattttacaaataaagatacaatactctcaatttaaatgcagtctacccgagtgattcttaccaaaggctttctttgatttttgccaaactcagtagccaacctatagttgcaaatgacaaatgagggtagctccaaagagaacggtgctccatattttctstaaagagtaggatgatcgtgaaacaaatgaaacaacaaagatttatgtcccaaccttactcctttattttttaaaatttatttttattttatttatttattcatttattgagatggagtcttgctctgttgcccaggctggagtgcagcggygcaatctcggctcactgcaacctccgcctcctgggttcaagcgattctcttgcctcagcctcccgagtagctgggactacaggcgcccaccaccacgccyggctaatttttgtatttttagtagagacggggtttcaccatgttggcgaggctgatctcaaactcctggccttgtgwtccacctgcctcagcctcccaaagggctgggattacaggtgtgagccactgcgcccggcctccttctttaaatgacaggaatgatgttactcaaataagataatattgttctaatactagaatatttccttcaatttttgtgctatttattcatgctataacagctaacactgttaggtttaatctgcattattagcattttcccatcactttcttaagcctgaccacaaaaaataaattcagcccttctgtgtaatatttgctgatgacagtggtgtaaatactcccaccatagccttttctgttaccaagatgaggttgctcaatgtgatttaggagagatacccagtagcacatcattgtatagtgtgtccaccatgcagatatgtacatagaggccagtgactgccagggcatgggcaacagtcaaatgtagtaaaacaaataggaggtagtgtgttttgagtatttattacctttgtttttaatttatttaattgtaagcttatataatttagtttatatcaatggctgtttgacagccggctcacaaactccccgggctggtgggagccatctccagcacctcacttagcctcagagaagccccctgcctccttccgtgctcagccacagctcaccctgctgtctcctaatggggaaggttgactttaggtcaccagctgccttggtgacttgcctacaagtgcgagtgagtctcagtgtgtgagcttttccttgacatgatttctttagttgctaaacataccataaagcctggtttaaaggcatcttgggcctcagtgaggaacagaacggcatcttctgagacaagggttacctctgagtccctgaaggcacactggcacctggccgccaccttgaagatgaatctcatttagtcatttgactaaatgtgcctgagagtgactgagggggcttgttaaaatggagattcctggccccatacctggtgacgagcattctgagggcgggagrtgtctcccagaggtcagcacatccacccaaccaacactgcctgatgcaggcagctgcagagcccacgcccagagcagctcctcaagggcccaggcgcctgctatggggcccctgaggcaggtctggggattagcagagcccrcagctgaagtcctcttcaagggaacagaggtgtcaccagaagccaaggagggctcagccaggacttgagggtggkcactgggagggggtcttgtgctttggatccttgaccttactcatttgaggtctgccatgattgaactggacccagttgcctggaagactatgagttttccaagatcgatcatcagcaccaattaaaagacaaatagctcccatttatctcatccttgccacactgcagggtccctggcaccctctgttccccatgtgaagaaactcaaggctcagggcagctgatgactctctgaggtcatgccctggcaaatagcagaggctgggctgagcccaggactgtctgcctttagtttgctgcatgtctttgagagacagattccatctgttcatgagtcccactggcggattgtttaaactttcttatgaacattttcaaaagcccatacaaataaagagtatgtcaaccagcactttttaagatgaactgtaaccaactagcttctcacatgcttctcatatggyaagagttaattttagctcatgaaacttttggttctgtgaaacacctgctgaacagactcctgggaagggggtctgtgggagtcgacatttatacaacctyccaggtgattctgagcttatcagagctggaraggcacttgctacccaggggcttggtgtggaacgtgagatgccaaagccaaattcaggcctctcagctsaaggcaccctgaagcacagctagtcactccagcacatgttgaagctgtgcatgtttacttcatgttgaactgttcatgttttatttttggaacactggggattggcaaaaaaaaaaaaaacccatgtgaataaagccttctagggcaccactgtgccgattgtgaaccacacrtggacaaaacaagccgcgcttgayagcaactacctacatgaccagcactcccctggatgctgatgctgccatgcgagacgggacgttggcgcascagcatgccagccacccattgcttctcctgcttgccaactcaaccgtgctgctccctcagacaccatcacttgcgyctcccaagcaatggaagccctggcgatgctctcatgagcccctcactccagcagagcccctgrccaagccaggggagcaggacttttccagccaaggcaagaaccagggttttctgactccttgaagatctgrtgtttcatggagttgaactagatgctgttccaacatctgagtgcgggaaggggaggggagggtcaccaaggatcttcatggcatggggacgggcagyggggagcacattcctcaaggactstctgtctgcccrcccgctgaccagtgatgttttccttccctgtcccgttttgttgcaggacacaacggactggtggctgtgagtacctccccacttgatcccacttcactggccctgggcgtgtggctctcagcagcctgggaaggagtgtgaagaagcaggtgggataagggccttgagagagaaggaaaaggcagcctagtcgatgctctctgctctccagtgctgactgggggctgggtcgaatgctcatctgcagccagctgwggacatcacaggctcctttcctccccttcccctaatggggaaaggtggtttccccatggcctgtgagggagtcagggagcttccagaaacaagctgacaaggtggggaagcatgtaaccaacayagcatgagagcaggtgggaaccaggggattgggcacctggggcggggtgggggcccttgactccagatcataggcagcccttgtgtctagagccctgtgttcccagccaggtccaggccaggtaccaccttggagtacatagctgctatgtggccaaagtgtgccctggagacrttgaggagctcagtctagcagaagggcctgtgccctgtccccaacacaactgacttcaagatcccaaactgagctggatatcccagagctatccttagcttatgcttctgtaacctgagtccagatacctccaggaggccacagaaggcattcaaggccacaaaacaaatgtggaacatcttcttgaagcagcagcagctctagaacatcaatatagggggaaactgtggctgtgctaacggactgatgttaaaccttaatactttgcctgatgtctaagttttacttgaacattttacgtgcggcattttgtaactcaatggatcagtaatttaaaacatttattttattttattttattttaattttttttgagrcggagttttgctcttgtcacccaggctggagtgcaatggcatgatctcggctcgctgcaacctctacttcccgggttcaagcaattctcctgcctcaatctcctgagtagctgggattgcaggcagccgccatcatgcctggctaacttttgtatttttagtagagacggggtttcgccatgttggccaggctgatctcgaactcctgatctcaggtgacccgcctgcctcagcctctgaaagtgctgagattacaggcgtgaaccaccacgcccggcctgattttatattaatataaacaaagattcatctcccagctctgccactttgtgaaggttaaggtgtcacttagcctctccragtcacrgtaaaatggaacaatggcacctgccctcacagagctgctgtgaaggtaatagatcatttgctgctaggacctggcacatgcagccttgcccaaatggtggctgttattactggaagtttccaggccaaggaaggctggcatccacagcccttcacccaaagcccaccaggaacacacttgtagttagtctagtttggtttcttgctctttgcagcgagggaactcacatcaggggaacctcgggttgcctcagtaggaaggtgttagaaagaacctagcacaggatttgagctttggtgatttgagggaaggcctacgaaaataggggttgccacagattagatactgtcaggaaggagggacagccctgcaactgggcagctcaagaaatctgatctgtagggaggagagacragtgtgcagagagcagtaattgataaagargtvgcagtcactcatttcagccaagaggggtgttcggtattttctggatggcacagagacattgcttttgtttgtgcttgcctcattttatcatagtctcatagaaaccttatttgaggttgtcaatctgtgagatcgttcctgtgtaataggagaatgacgcagctcaccttgcgtgccaggcctcagccactgagtgacagctgctgtttctttctcagtaggttatgataggaggttatgttaggaggatagatgctggtttcacgctgtctggtttcaattcccaacacctctactcatcagctctgtgagcctgaggcaagctgttaacctcattgggcctcagtcttctcatctgtaaaatgggagaatcatagtacctacctmttggctggtgggaaaaattaaacaagacaatgtactcactgcttctggcacataatagctgccaagtgagctttttgaaaagtccgacttttgcatggcaccattcctgtggtcacagggccagcattttakatcggtagattcatgaccagtttggttcaacaaatatttattgatttttccactaagtgctagaaaaaaattaatagaaatccttgcatcatttgttctcccaaaataaagctctgctatgaaccgyttcatttactgagtacattctctgtgccagggaccacttaaaccctgtctaggaaccagctcagttaatcttcacagcagccttatgaagtgggtaaagccgggactactttcatcagccccayttttgcatgtgaacaaactgaggccagayggatcaggtactgaggctgcagcagcagagagagaacgagggactgaacctgggtggaagggtcagcattcacaagttccacctcactgtgctgcgcttgtaggagaaatgaggctkgctccctgcctggaggagagcgacatcccagggcagggtggcaggaagcagcgtgagtccccgaggcaccaggcctctaaggagggaagaccactttcagytgggaagtggaggggcgggagcaggcctgtcggatcttagaggacatctagaaaaggcgagggtggaaagggaagcacagggaagggcattcccagaggcaggaacagcatgagcggggcagggaggccatggggtgtggsccatactggcctatagtgaggaccttagtctgcgggtcagcccgagggagccctgacatttcagagggataaagggagggccctgtgtgctgccccactycccaggcagcgtacctgcagagactgggggtgaacaccgccgtcttcgagaggcgccatgtgatcgggggtgcagctgtcactgaggagatcatcccaggtgagctctgatgtggcatgggggagtggagggcagtgactcagggtgacrgtctycatccctgctgaccccgggtgacrgtctycatccctgctgaccccgggtgacggtctccatccctgctgacccctggtgayggtctccatccctgctgacccctrgtgayggtcctcatccctgstgacccckggtgacrgtcttcatcggattcggtttcagggtttaagttctcccgygcgtcctacctgctcagcctgctgaggccgcagatttacactgatctggagctgaaggtagggcccccccgccrgcccgattgcacggagggaggaggcagttccatcttcccaacctgkgtggggggtccctgttctgtgcccgaggtgatgcccrccsctgagggctccctcttccacccaagtcttgtgtatcccacgtggtctccctgctgcattcccacagatgggttttgtctcgtccatgtagtgtcttgaaaagtgggaaatttcatccaaaaatcagacttcttttgaagaatgagctttttcaccctcaggcccacgtgggacacctatctgaagccttgggcgcctgagcttacagctgccttgggacawgagcccgatttctgccctcattgaacttgagagctgcttccctctcttggcagctggagcaggaagtggggcctggggacttttctggctcccgggctttttggaaggttcctgggagtctcatctggcgctgtttgcctctcttagtctgctgacctttgtccacaacctggcccaaccctgccccccaccctttcaccttccttcacccccactgtcttataaaccgcgtcaccacattcttgaggctgattggcttctacctgcttagtgccactgtcaytcaccactcagagaaaagggttcttggtgctatctgcagctgccactcacgttggtgccatctttttttttttttttttttttgggacggagtctggctctgtcgcccaggctggagtacggtggcgcgatctcagctcactgcaagctcctcctcccgggttcatgccattctcctgcctcagcctcctgagtagctgggactataggcgctaccaccacgccakgcaaattttttgtgtttttagtagagaagggctttcaccgtgttagccgggatggtcttgatctcctgatctcgtgatccacctgcctcagcctctcaaagtgctgggattaacaggcgtgagccaccgcacccggccacgttggtgccatctttgctctaaattcaaaattttaaactagtaagatgtccagctgttgttcacagctctttggctgctctaactggttcatgtagagagttcttcaagccactgaaacagagtatgtgcatcctggtaccaggactggatgaaatctagccaggcctggggatgggtcgctggtctccagtccagagcagaccatagcagcaggcagtttataaatgcaccacttattcatagtggcagatgttggggagcagggaccctccttttggcaaacctgatttaagagactaagaatcacagaatggacattttcacttgattattctctttctttaaaaaacgttacttatttgaaatggtatttgtcatagtgttccttgaactagaagctcccaagtgaactgagtagatgctttaacctctgccttgggctgcagtaataggagtatggagctcagagcagggagaaagcagtcctgttgtgtgatacgcaggactcaccccatctggagcaccttgttttaacaggacattgacagcctggagggcattgacaggaggacaactaaactccttccaggaatattgtctttccaaaactataatggagagcgtttattttaccagcatcacatcttgggctatgaccttaatgttctatctcaattgatccttacctgtaagtcaagagccatgttataatcagggaactaaagttcaggggttaaattcacacagctagaaagtgatggagaattcaagccaaggcctgactgtctcctactccttgttcttgagctatgatgcgctcaggcctcttggtaccaataccgcccagactcacacgtctctggctcttkgtactttgcggtgaacgtggtgatagagtgcccctggcagctccagcgcagtgtgcacagaggctgagactggagctgctggaaaccggccggctgcgtctgcctccctgctccacagctcaccagctgcgtgatttcaccacgtggtgccttcttttcctcatctgtaagagggaatagtaacagcagctgcctcctaaggccacatcagcacagtgcctggtgcacagagggctcagtacttgtcgctattattattacccccatttggcacttgagaaaactgaggctccagaaagacccatggctggagactactcacccaccctgccacttataaggctgtatccaattagagtgagccctcaactaaagtgagaggcttggctttggcaccactgcccctcctcccctccttgagccaaagcaccctccactgacccgctgtggtccccaccagggcctgcctccccttcctgggtgttagtttccacagctgtcaatgcragcactgacttggatcacctcccggttccatccacctagtaaatgagtttgcttttgcagcggccctgcgctggatgatggaatccaggctggaagggcagagcctttgcactggtggagaagggggtgtggaggggggcttttcatccccttcagccataagccaccttccccatctccccctgggccagccttgacctcactgccagaggcaatcccatcctccctcccctccctcactgaccttctgggtctcactcagccttattcattttgctcttgcttttctcctggaaatctctctaaggtagggctctaatttgcagggccacaaagtatgacctgggaaactgctggggaaactgctggggaaaccccaggggttcttgctcacgagtctgattctgtggcagtggtrgggcccagaaacggtcgtttttatggcattctcaggtcattctgaaagaggaggcccccagaacataactttgagaaccacaccctttaaatctcttgtatctctggtcctttagacacacacacagayrcacccttcacacacacacaccctttccaacaatttccacccaggatgactgtgcatgctgagaactctcatggggtaaataaaagaagggtttgctttcattttgtttttttgggktttttttctgttttttaagaaaaaagcttcataatccgaacaaatcttgtggatataatctgatggttatttaacattccccttctcattcagactccacataattaaamctattgttaaaagaaaaaccttcactaaattaaatttaatagagtttaattgggcaaagaatgattcataaatgaatcaggctcccgagctggagtatgctcacagtctccagcacagctccatggtagaagaagatttatagacagaaagtgaaaagtgatgtacagaaaatggaattgaggtacagaaacagctggattggttacagctcagtgtttgccttatttgaacgcagtttaaacagttggtcccctttgattggccaaaactcggcgattgacacagragtaggttacagtctgtttacgcctccttctaggttatagttcactaggaacagagaaacctttaggttgagcttaaagtatttaaggaggcagctttaagctaaatttgatttaacaccattaagaatgacagagcctccatttagaagagcctccatttaggtttcattatgaatcaaatgaaaagtgattcatagtcaattagttatacttaaaataacttttggattcctcttaggtccctgatttggagggtttattcgttcattcagtccatgtttctgagcacctgctatgtgccaggcactgagagaagcccttgggtgtacggcagtgaactaggaaggcaaggacactgctcttaggcagagaacttcagggagagtgccaagaagaaaagaaaagaaggcagcattagagaaagagagtggagattccagcctagatggtgaccaggaaggacatcttcctcaaggaggtgacatttgagctggtattcaggtaccaagaggtcaccagcagcagccatgtggacatctaagcagtctccagtcagagggaagaagagaaggacccacccaggcaggcgtgagcagagggcaggtcagtgtggacagagcagacaggcagagagcaccagatgggggtgggaggggcaggactgcattttatccaagtgcagcgagaagccagtgaggtgtgtgatcaggaagttcactgctaggatttgtgactttacaaaggtcagcccacctgctggctggtgaggactcggaggaaacaggagggggtcgcatgtggagcactaggccgccgctgcagcggttcccaaaatggcggcttggagagacgcgcacagattctggaggcagcggatgggatgtcaaggatgaccaggagagagactaaggatgcctcctgggtatgagtgagtttactacattaagaagaacgaagctggaagtttctctagcttagaataaagaatgtctccatcttagggataggagggaccccagccgtctcctggccccggcccccgccagcatcggaaatctcctccacagagtgtccagagctgcggcgagcctgcccgcctggagcatctccagtgtggagcaactccagcggtaattgttggaaaagcctgtttttggtttcctygtgcttttctaaaacgtctactctccgatctcatttctctcctctggggccataccttgtctgcaacctagcattcatttattcagagtcgacggaatgcttattaactacactgtgtctacacgcggagggtacagcggtgaacaaaacagacaatgcccctgacttcacagggcttacattctacttggggagacaatgaaaacactaaatatgtgattagccatgtgctgacaagtgctttggagaaaaatattgcagggtgagggggcagggagtgcgggggaggcctggctgataaggtggcattccagccaagacctcgagtcgtgaggttgcaggccacggatctggagaaggaagcctctcgacagcagaaactggaggcggcacaggccccttttgttttatctgtgcctgctttgaagaagtggatgtgctcttggaaaattctgtgtgctaatcaaatatttgtaaatcaaatcatattttaaatgcatcaaagaaacttccatttaaagtgaccctggagtaaatgagtctgcaaagtaaataaaatgttctgatgtgaataatttatctaccttgtaagtatagattttcacataaccattgcttgattgtgtctttctaaatttaattatttatttctgaagtggggcagttacagaccggtgctgagagctggggctttgcagttacagagctgtggttttgaaacccagacctacctcctaaagtgacctgggacaaattatttaactcctatgagcctctcgtgttgcttttgtacaatgaggataataagacagccatgtgccaccatgttggtcaacgatagactatatacagtggtggtcccataagcttacaatggagctgaaaaaattcccgtcccctagcgatgccatagttgcactgcaacatattattcatgtgtttgtggtgataagcctactgtgtggccagttgtcaaaaagtctagtacatataattatatacagtacataatacttgatagtaaatgactttgtcactggctaatgtatttattatactatacttttattattattttagagagtattccttttccttatttaaaaaattcactgtcaaacagcctcaggcaggtctgtcaggaggtatccagcaaaaggcattgctctctaggagatgacagtgccacgtgttactgtccctgaagaccctgcagtggggcaggatgtagaggtggaagtcagtgacattgatgatcctgaccccgtgtaggcctaggctgatgtgtgtgtttgcattttactttttagcgaaaaaaggttataaagtaaaaaataaaaataaaaaattttaaaaacagaaaaaagcttatagaatgaggatataaagaaaatattttatatagctgtacaatgtttgtgttttaagccaagtgtctttttaagagaatcaaaaaggttttaaaaattaaaatgtttataaagtttaaaagtttgcagtaagctaacctactgaagaaaattttttaataaatgtagtgtagcctacgtgtactatatttataaagtgtgcagtagtgtacagcaatgtgctgggccttcagtcactcaccactcactcgcccagagcaacttccagtcctgtaggctccattcatcatgagggctctatacagtatcatttttcttaccttttatgccatattcttaatgtaccttttctatgtttgtttttttttgtttttttttttttgagacagagtcttgctttgtcacccaggctggagtgcagtggcggcaatcttgcctcactgcaacctctgccttccaggttcgagcaattctcctgcctcagccttccgagtagttgggactacaggtgcgtgccaccatgcccggctaatttttgtattcttactagagacggggtttcaccatattggccaggctggtctcgaactcctgacctcgctgatctgcccgccttggactcccaaagtgctgggattacagtcacgagccactgtgcccagcctagacatgtttagatacccaaataccattggattacagttgcctccagtattcagtgcagtaacattctgtgcaggtttgcagcaacaggctacaccccacagcctatgtgtggtaggctatcagatctagttttgtgtaggtacactctgtgatgctcaaactgtgatgaaattgtctagcaatgcatttctcagaacatatccccatcgttaagtgatgcaagactgtacttacaaagttattgtgaggtaaccattgtaaaccctagtacagtccctggcatggaatgagtgtgtcatgctgtgatgtggtatgacatggcatggcrtagtgtggtgtgatatggcatggtatggtatcacatggtgtggtagggtgtggtatgacatggtgtgtgtggtgtgatgtgatgtagtgtggtatggtatgatgtggcatggcatggcgtggtgtatggcatggtatgtgtggtatgtatggtatggtgtagaatggtatagtgtactgcgatgtgatacagtatcgtctaccatagggtacttgggcaagagggctttttataaacttatatttaaaaaacagacaccaggaccatacacttgggaacctacacacaggtacctaaatggtcacacaaacacaatcggagaaagatgatgggcagagaccacagagccattaatatgtggcccatgctatttgtgttttgcagaaacatgggctgaggcttcatcttcgaaacccctactccttcacccccatgctggaagagggtgcaggcagcaaggtgcccaggtgccttctgctgggcacagacatggcagaaaaccagaagcagatcgcccagttctcccagaaggatgcccaggtagggaaggcgaccagtgactgagctcctgctccctcagcagcctagagatgggcctggttggattgtcctagaacaattgttcaaaggccatggacactgcgccaggccaccccacgttcctaggagggctccagttggtggcagctcttgatctcaggcactgcgaagagaagcgggtggaggatgctgattaagaccagtggactgggaggcctgctcacctgcgtgtgttcagtatggggccactgtcagaggggctgtgcctgctgagttcaagaggaaatgcactggcacgttcttacactggcgtgtgcttcatgcccctccagctttcaggcagagttccaggtgtttgtccacattaaagcacatgaaagccaaaaaggaggatgagggaagatcagagaaaattaaggataaataaactgaatcaggaacttaggacaggagagttctaaatatttattcagtgtggcatcccaaggctccctcctggctgcccaaggcaacaaagtgtccatgatggtgtgcaggtctggtgacaggatgaacacatgtcggatggagaatgcacttttttcccttggaactgcattctaggaacctgctgggtggccttgtctagatgagccactgagttccrtaagggccctgccacagttggttctgtggatatagaaagattatttgaatggccattttgtaccaagcctggatatwagctgagatgtagcattaaatcatatctcagtggagacatttttataagaagaacctaggttaatagaacccatgtacattgcttttgttgtgttaatctattgctgggtaaaacttagagaaccacagacacacagcctacatgtctcttccaccagcagttttcaaacctggctgatgatcagaatcacctgaggagcttagccttttattttgttattttattttatttgtttttgagacagggtctcactctgttgcccaggctagagtgcagtggtgcgatcttggctcactgtaacctctgcctcccgggttcaagcaatcctcctgcctcagccacctgagtagctgggattacaggcattcaccaccatgcccggctatgttatttttaatttttttgtagagacaaaagtctcactatgttgcccaggctggtctggaactcttgagctcaagcaatcctcccacctccacctcccaaggtgctaggattacaggcatgaaccaccacacccggcctgaggagcttagcttttttaaaagtgcttctttggtggttcttttgtgcagcagattggagaccaccacctgcatcctctcgtccaaatcctacccatctcagaggcacttgaggggattctgcacaaggccaggtccccgggcctgcaggacactagctgtggccctacatgccagcgaccacacacgctggaggcaagtgcccatttcccatcgtggaaagtgaggagcttgatttctggttttgtctttccatgctgtcatattaaaggcctgcttagagaaagctgtttaacttcatttttaataagacttctcgaatgtattttaacatggaacttttctttatgtaacacttattaaaatgccatgggtatatccatgggtagagatggaccaaaattcaaagtccagggctaagaagagtcaggtagggcctccagtagcacaggcttctatcactgctcctgtgccctccagggaaaggagggtgggtgtcagaaaccaggctttcgaaagtggattctgacatgggagcttgtggggtgagaggaggcaggcttctgtgactgcaggtgatgagacggcatgggagacgacctacagaccggaaaagaatacaggcaaagaggtctaacttctaccaataatataggaaaggacagaaggacaggccagcgtggcggctcacgcctgtaatcccagcactttgagaggccgaggcaggcggatcacttgaggtcagaagttcttgaccagcctggccaacatggtgaaactccgtctctactaaaaatacaaaaattagccgggcgtggtggcaggtgcctataatcccagctactcaggaggctgaggcaggagaatcacttgaacctgggaggcagaggttgcagtgagccgacatcgcaccactgccctccagcctgggtcacagagcaagactccatctcaaaaaaaaaaaaaaaaaaaaaagaagaaaggacagaaggaagaaacttctaagtggtttcatgrtttatcgcagagaccacaccctaggattgttgccagttttctgtgggtgacacttcgtgttagccagcattagctccttgtccctgtcaccactcccagtgattctcctattgcccagggtctcctgaccaccaccaccccaccccatgcactcttcctggtgttgatgttaacccagagacctggaactgggggagctcaacagagccaagctgggccacagcrgggaatgaggcctgaggaaccgtcaagctgtgggggggtgacaggccatctggggacagcatggagggcagggatgtggacagtggggccttaatgcagagctctgttccaggtctttcccaaatatgaggagttcatgcatcgcttggcattagccattgaccctctgctggatgcggcccccgtggacatggcggccttccagcatggctccttgctgcaaaggatgaggtcgctctccaccctcaagcccctgctgaaggcaggtaagtccaagtgcaggcaccagggcatgatgagtgaccttcaaggaggtgagcccattgtctcgatgcctagacacaagcctgaacctccatggcagcctgccagctgggwtcagttaacatgctgcgatcaattaggggcagcctggagcactttgttgagagcatcttaggctgatatgcctttaaaatagagcctgagaccaaggcttatgcgtgggtagttcatttggaagggtgaccccaagrcacaaaaatagcagaaagttggggtgaaagtggacagagaaagagtcaataccagagtgtgtgatcgcactagccagcactgtgggtgacaagatgctggacctgtgtgggccctctgggaagccttatgaaaagcatttgaggaaccttctcgggagatggaaagggaaatatttatccattgggttctatctcccattggccaagggttgcctcacagggcattgactcccacacttctgggctgtgcatctgtgggtgccaagtaggttcccatgagtgccctgccctggtgccagagaagccctagggaagaagtagagaggctcacttttcaggactgaagtgagttgctgtggagttgcctgtgtgaagctgatcaaagcctgcttggagctcagcatcatggctgtggctagaataagatataggggccaagagatttgaagagctgcccccatacaggaagaatgctagatttgggctcagcaaggagaagttctgtgatcaattagtaatgtctgccatgagtatgcgaatggaaggctcattaagtgtgctattattttctaccctccttgagggtatacagaccagtttaacctctatatcctagaaaaaaaatyatttgtttcccacatgtcttcgtggttcagctgattccagctggctcagctgatctggtttggtctcaggcatgtgtttgtgtctgcagcagctcagtggaggcagctctgctccaggtacctctcgtcctccttgtagaagcacatgctgacctgggtgtggacttttcacatcagtggcacaagcacagagggcatgmcccaatgtacaggcctgtttcagttctgggtttgtgtcacatcggcaaacattccactggctgrccaaatcacatggatgagcccagagccaaggagccrggcaggttaaccaagttgtggtgggttgagaggcactgcagacttatacattgcaaagagtatggagccagtggaatctattacaaatgcaaaaagtagacactgcctctctctcarataaccagtccaaggagctctgtgtgaaaaacaggcaaaaaacatttattgagcaactactatgtgycagacactaagctaggcccaggggctgtaaggctagagaccatgatttctaccctgaaggccttaaagcctagtttctttctgaaatggtctgaatcagggtcataggaatggatcagccatgccagccttctcccaggatatgggccttccagagttcgaaataagggaataaggtacaagtttaaaattttccaaaaataatgctaactgcttaaatgtattaagtacccatgaacttgcaaatgctttacctagctcatttaatcctcaccgtagcccttggggtgtaaaataggattcccattttacaggtaaagaagcaggttcagagatgttaaaaatgtgtcccaggcactgcagctagtgagaggtgtggccaggactcaagctggatctgtccctgcattggctgtgctataccacctcctggcaggaagtctcagcatcctccatgcttttatcccccaggccaggtcggagggtttccctgtcacctgtttcaacttctgttttgtggatcttctcttgtaggccgcatcctgggagcccagcttccccgatattatgaggtcctcacagctcccattaccaaggtgagtggttccccagcctcaggcccgaccaggcagtgagagggccctcctcccatccaggctyctaagcccttctctctgctgttgtgctgtccaggtgctggatcagtggttcgagtctgagcctttaaaagccactctagccacagatgcagtgattggagccatgacaagtccccacactccggggagtgggtgagtgaggggggtgaggtgggacacaggagtggggcatgttccccaacaggagtgaggacaacagtggcagtggcagcaacaacagctgccacttaacagagctcacccagtgagccaggaaccgagccaggcacatcacacacgatccacttaaccctcagagcaacatctgagaactgcggttcagagaagggagtgtcttgcccaaagccactcagctggtaagtggcaaggctgatttccagcttgaggtgtctgactccccaaaatcttcctttttagtgactgtgccctactgcttcactaagaaaagcctctctcccacctcccgcttgatagctcaaaattaatatcttcttttctctcctcttcccttccctcttctacctctccactcccgcaaacgcccattctcccttctctctcactgttccttcccctgggctctggtacacactcacacagacacctcaggatggacaggaagctgcctttttctttatgagtgagggtttgtgctgacagcccaatccgagaggtggcagtcagacacagcaaagcctgcagtgtggtctgacttaatgagcccccgcagaagcaggaatggaaggctgtgtgtgtgtgtgtgtgtgtgtgtgtgtgtgtgtgttgggatggagaatgcagccaagggttgggccgtttccagtgcaccagaagatasagctagaagctagaagctagaaggcgtcgacgtggcttttctctmaagggatgagcacaccctcggaagtggtttttcaacacatattaagccggccccaaattcccccagggcgatggagatgggggcttggcagcagttgccacacatyggccaagctgtgatctaccagccaatctggatcttccagctggggcctcctgcccttttctcttcggatccctgggaggcttaaccagtgctccgtttgtgatctttaagtaatctgttccatcattaattcttccaacaaatatggatgagcgcttgcctgtgctaggtgctggggatacggtagtgagcrgagcagatgtcctgatgggtgagagacacagagcgagtgatgatgatgaagtggcgtgagtgtgatgctaggaggagcagccgggacacagcctggtctagggtcagagaagcctctacatggaagaggtgtttgatctgagacccaaaggacaaagaggagttaacaaaacataagatgagggagggaggggcttcaggccgacagaacagcaggggaaatgctggggttgagagaacktgtgatccacccaggaaatcgagaggttctgttagttaggaggatgggatatggakagggggamaggatgagggatgaggctggagtgcctgctagaagactggccattatcctaagagcagtgccaagccggggaggcttggaatggtgataagtgagtggcaggagcagagctgggctttaagatagggctccaggatatatgtggacaagacctgcaggagagaaagtgtgggagagggggtccaatgaggggcactactgcagcagcataaggaagagaagagaggctgagaggtgggatgaccttgaaagccctttggaggctgagttggtgttgctttgtggatgtagatggggaaggatggtagcggtcaaggctgacacctggatttctgtcggaaacagaacctcctgttgaaaggtgccgttcactgggatgggaaagattgaaggggaagcagctggagaatggggaaaaggtggtgggtttaagatgctgccaagaaagggtccaaagggagatatctgtgggtagctggacaccggagctggagctcaggagagggctggagctgcaggtttgggcatcgttgccttctttgtggtaataagctatgcacatagacacacttgttagggagagggtgtagagaaggcaaagggctcttacaagaacttgagctcattgaaggctgctgggagarggctggatggtggcagggaagggctgaagatcaagatggaaaggaatagttgcacctggaactctggggagatgagatcccacctccaggatctgagtcggatggtctgtccacaggtatgtgctgctgcaccatgtgatggggggcctggagggaatgcagggggcctggggctacgtccaggggggcatgggtgccctctctgatgcgatcgcaagctcagccaccacacatggagcaagcatcttcactgaaaaggtgaacggcccctctaccccaccccaattattagtaaggatcccaggacagaacaaagtctcagatttggaaggtcccttgttttaccaatgaacagaggggccatgaggggatgggttgcagaatcaagagattaaggtcatgcagtctgttagtggctaaccacccccttggaattccctggtcactgaactgagactgagtgtttcatggagaagctgaggcttcatggagaagctgcagaacttggtgggatgggtttgggatgaagaagttgtgaatgcctaggagcagcacagaccatggaaatcccggaagatctaacmtggatttcccttccygcggtttctggggccttgttctggtgggctctagacagtggcgaaggtgcaggtgaacagtgaaggctgtgttcaaggagttgtgctggaagatggcacagaggtgagaagcaaaatggtgctgtccaacacatcaccgcagatcaccttcctgaagctgacgccacaggtgaggctgtgrgcaggagggtggagcttagatgtctgccaaaacaggggttagaaatcgtggggattgagggagccaggattgcatcagggtgtgagatgcaaaagccaagtctctgcatttgggaaacaggsgggtaagggcaggtagcaaacggggaagaagcctcacaggtggggagaaggggccagagaggtgaagtgaccaagattccggccattggcagagccagagctagaacccaggtctgactttcaatctagagttatttccacaactttcctactttcctgatttctcccctctcaccgctctaattccattgtctttgtcaatgatctgttrtattatccatgattattaattaatcaattaacaaagagccacaawacttctgggcatacaacaagaaatactggcacccagaactggagacttcagttgatcttggtggatttcagctgcttaaggcttgctcatgcgtctgcagttggctgtgggtcagcttgccggctgctgatcttggcrggactccttcatgtgcctgggagctggctggtggtggctggtccaggaccgtttctgctgggatgaccgggtgggggactcggctatgctccatgtgtctgtcctcctccagcacggtagtccaggcatgttctcaaggtctggcaaagggcaaaagcaggcaagctcaagcatgcatgcaagcatcacatggtttgatctctttgcatcctgtttgctagcattggccagaccaagtctcatggccaagcctagagtcagagtgtgagagcactgcaaggttacacggaagtgggtgtgcaaacagggaggggtgagctttgggggcagtttttgcaattgacttaccctgtgcycaaaagatatgataacatgtatacgcacatgaagctcctagccattcttgggggcaattcttaggggcaaagcactactttttctgagtgattccattactaaaattcaacaaacrtcagtaaaaagaaacttgttaaggcaattctgagatcgtcgaggcttccaagagcttacagaccagtagtgaaaagaggcctgcaaaccactgacccctttgcaagcagggagaggtgcggactatttcacagtcagaactgctggccaagcgcggaggaggaagtggttagagctgagtgggaggggatctaggaaggcttcacaggggaggtggttttggctgagctttgaaggatgaagaggatttcyggagggagcgactgagggatcttcctgagcaaagaaagaaggcagcttccttggggccttggacatctgaggcctttcatggagccttctccttccaggagtggcttcctgaggagttcctggagagaatctctcagctggacacccggtcgcctgtcaccaagatcaatggtaagaggcacascacattgcagcactgtctcctttgacccatctgagtgagaaacctccaggctgggggcagctgaactcagtcatcatctccattcccggacctccagcctgtgtccccctgcagcctggtcagaaggtgaaacacttgctcatactttcctactcccgtccgccactgagggtagcagggtgctggctgtagagggaggaccttgtggggctaagacctgaccctcctctttggtccctcagtggccgtagacaggctgcccagcttcctggcggcccccaatgctcccaggggccagccgctgccccatcaccaatgctccatccacctgaactgtgaagacaccctcctccttcatcaggcctttgaagatgccatggatggcctgccttcccacaggtaggggccctggactttatgttccctgatgttcttccacatgggcctgggaggcggggctgtccatgccacccacagcagggatcaggcctggtgttcaaccttcacagtgacttaggatctgccaaaatccatactcctaaggacaggaagtgcatcccaggtgaaaaatctgaggatgagggcaggtaaggggtgaagagcggstcaggttagcagaaggggcagaggggcagagcactgcccaggaaagtgctggggctggggaagaagaggagaaaatgtgttctgggagagcaaaggaagttctctcattcagagcccgtcagagagcacgcactcaccgagtcccctgctccgtagcctttctttttctgataatctgccttcttgcaaaacttctaaaagcatttcccacctcccactgcagctgtatttccattcttctggaacaggcaggggcgctataggagcaagtgcctttccatcctgtccgctgtccagcacacactgttgaaaacctactcagtgctggactctgtactgggtatgggctgggagaattagcggggcaggggcatgaaactgacacaaagcttatgataggacaggtacacaaatatttatagcatgtggtaaagaagatgtgcgcctggaaagaagggtatagggcaaagttcattcatccatttataaatattctggggtctctattctgtgccaggcttggttcagtgagtgggcacagatcagcaagcaaagccaagaaagtctcaggtcgttgactctctatccatgagaggaagacaatcaacaagtaagcactgatgatgagcactgtggagaaaaataggcagggaaggggaggaaaggcttctctaataacgtggcacttgagcggagaccggaaggaagtgagaatacagatcttatgggtatctggggaaaaaacgtccagacagagggaaggtcaggtgcaaaggccctggggcaggagtgtgctgctgtrtaggaggcacagggacgaggccagagtggctggagagagagcacctgggaatgaagggtctcggatggtgctgggtcttgtcaagtgccctggctcttactccaggaaagtttgtgcagagcctgccttatgctttaaaaagaccaacctggacactgtatgcagaaaaagttaaggcatctgttgcaatgggttactgttgcagaatccaagggagagaggacagtggcttggacaagggtgggggcaggggaagtgatgagaagtgttggaagactgggtatgttttgaaggtgaagccaacaggactttctgttggatagggagtgggatgtgggtcaaaaaaaggagcgactgtgaaatgatgcctccatttactgaaaagaggaagaggyggtgggggtggagcagattttagaggctaatcaggcattggggtttgaacaggggatgtttgagatccctggtggacatccgagttcagcgagaacattgcagctgagggacgcagggagaaggggcatttcccgtggccttgaaggagactcatatttggagatcagagggagaacatgctccaggtagaaaaggtgtggcaggcaaaggtggtggggtgggaagcaggtcacagctctgctggggctcggggcagccctagcagctctgtcttccattggtctgctctggaaaagacagtcaggccactaaagcctggctgaaatctggctgcttgggcgcctgctgtcttaggcctggcccctttccacactcccactgtctgtgtggaccttcgagacatttgcrtttgggagctgtggttagagcacagcgtgtgatgaaggcaggcaaggacaggccatgcattcgggggtctggggtcaggcgagctcctcacaggtgctctggaccacgctagcagccgctaagcccrtgcaggtggacaaccactgtggctgtagagcgacaatcgcccagaattggtgtcatctcagsgcctccactgtgtcccaagtcatctcggatgccctaccctccgcmctgctgctctttagacctgccgtctcctccctgcccgcacaggcctgtgattgagctctgcatcccttcctcgctggaccccaccctggctccccctggctgccatgtagtctccctcttcactcagtacaygccctatacgctggctggaggcaaggcctgggacgagcaggagagagacgcttatgcagacagaggtaaagacagctgcacgttctgcctccagagccacagccgggcatgcgacccractgggcctgctcctcctcactgccccattcaggatygacaactgcaggtgccrttccaaagggaggaaatagtcaagggaacctcaagtcaacatagttgactgcaggggtcaggaactgggctaagaaagtcaagaagacacagttcctgccctccagttgctcacagtctagcaagggatggaggagactaattaagaaaccttttattacagcacagctgactgcacgaaccaaaggagamgcatgagccagagagacaaggaaggctttcaaaggaagggatggtcaagctgggtttccaaggatgactaggagctggccaggcagcaaagggcattccaagcaagagaaacagcttgatcaggccaggcgtgggggctcatgcctgtaattccagcacttcgggaggccgaggcaggcggatcacccgaggtcaggagttcaagaccagcctgaccaacatggtgaaaccccgtagctactaaaaacataaaaaaattagcagggtgtggtggcacatgcctgtaatcttagctgctcaggaggctgaggcaggagaatcgtttgaacccagaggcggaggttgcagtgagctgagattgcgccactgcactccagcctgggtgacagagygagactccgtctcaaaaaaaaaaaaaaaaaaaaaaaaaacagcttgagaaaagtgaagaggtgaaaaaagctgcatatgcaaaaggagatcagcagcttcgtgtttaaggttggggtagggaagtggggaaaactggggactggactggcctacccatgcatctttgggatgaattaatcatttgcttgtggactgatttttgtttttcacctattgaggtataatttgcatatgataaaataagcccatttctgtgtgtaatttaatgactgttagtaaatttgccaagttgtacacccatagtgcctcctcttcttcctaabaccatctcatttctctgtttttggcaccccagtgttygattgcatcgaggtctatgcccctggcttcaaggactctgtggttggcagagacatcctcacaccaccagatttggagagaatcttcgggcttcctggaggggtatgtataagcctagggggtctctcaccatagccttccctctgcaccctcacttcctggctrtgacctctctgctttatcttgtccctccatactcagctttcatcaggaagggaggacagtggcagggaccccggctgagagagggcagagaagcggtcaaaccgagggaatgggggatccctastgggggctcagaaacacaggcaggacagcccccactgagaaggtcaccaggattgtggccctctgccttgacaactatgctggctctgccatctgactttcttgagagagagcacccccttctcaaggcagcagcayatcctcagacttgtcaatttatcaaaaactagagattggagacagggagaccagataggaggccaggttcaatcgcctcattgcagctactgagcacttgaaagatcagagaccaccctaggcaacgtagtgagaccccatctctacaaaaacaaaaaccccgccaggtgtggtggtgcgtacctgtggttccagctacccaggaagctgaaacaggatgatcgcttgagcccaggagtttgagactgcagtgagctgtgatgcgtcattacacttcagcctgggcaacagaatgagaccctatctctagaaagaaaatttaaaaaaaaagcaaaagaaagatctgaggccaaagtgagatgtgctgcaagtgtagaatgcacacagtatagaaaaaaatgtaaaatatctcatcaataagttatatattgattacatgttgaaattataatattttggatatattgggctaaataaaatatattattgacattagtttcatcagcttgcccttccttccttccttccttccttccttccttccttcctccctcccttccttgtttcctccctccctccctccctctcttccttctagagataggtcctgttctatcacccaggctggagtgcagtagtgcaatcacggctcactgcagcctckacctctggggctgaagccatccatcctcccacctcagcctcctgagtagctgggccyacaggcatgcaccaccacacctggctaatttttttttttttttgtagagatgagtctccctgtgttgtctaggctggtctcaaactctggggctcaagtgatcctcccaccttggcctcccaaagtgctgggattgcaggcatgggccaccacaaccggctctgcttttactttttaaatgtagctactaataaatcaaaaactacatatgtagctcccattacatgttcactgaacagcactggtccaggtatagaggaaagaaggccaggcagcgggaaggaagggaatggctgggtacagcaggcatggggcgggcagacttgagaagccttggtgacagtgtgcacataggagtcagggtggaggtgatgtgaagggtaggcacagaggccagggggaggaaggtggtgtcattcacttatgcaggaggatggggaggagcagactcgagggaagaggatggcctcagtttggggaaaggtgaagagggcagtgggggagcactcctgtgaggatgcccaacagacgtcaggcttcttgtccagacctgccccctgagtctgaccttcgcttgtcccatgctgcctcccttctcagcctggggctggtctcacccaagccaggggggcagaaccgtgctcgggctccgttgccccttgtctgccattcacagtgatcctgctggagcttggacaccggggtccgggctcaggtggatgccttggccagagaagggagttctcgcagagacgcatgccaacagccacaataagtcagacaattctgtttttccaacagagggagagggatgcagagtagagagcaaaaccctcttttccttcccgttcagttcgtgttccccaccctgctttcttcctcaaaaagcctctggaaaacttcactcccagccccagggcatgtgcccattccgtctcatctccttccctttctgcattttaaaacccaagaaaatatcctggaaggagaagaacatttgctgaagaacaggggaggggaagaaacccagccagagcaggaaaggctgtaactctcctgtgctgrtgactgtggccctgcctctgcagaacatattccactgcgccatgtccctggaccagctctacttcrcccgccccgtgcccctgcattctggctaccgctgccctctccagggcctgtatctctgtggaagtggggctcatcctggtgagtgacctggagtcccactaccctgtggggactgggagggctcactggaggccagagacttggagaaggaggaagttaagcaatgaaggtggcagagagggaggggagcagggaactcccaacataagctgccctgtgttcagaattatccatgcacaggtgagcacacagccgctgcctccaccaggctgaccacagcccacagttgagctcacacctccccttcaggaggcctggggatgcatcctggtggaggcatctcaccacattccaatgtggggttgtgagagacccatgtccctaaattccccatccgtatatatatttagacagggcttcacgctatcgcctaggctggaggtgcagtggtatgatcacagctcactgcagcctcaacctcctgggctcaagtgatcctcctgcctcggcctctggagtaggtgggactacaggtgtgtgccaccatgcctggctaattttttattcttttgtggagatgggttttgttaggttgcccgggctggtctcgaactcccgcgctgaagtgatcctctccactcagcttcccaaagtgctgggattagaggcctccatccatattttagaccaggaaggatggataaagttaacttcttcaactttacaattctttcttgtgcgcattccaagcctaacggagctggctgaggckatttgctatgcacactttctctcagctgtgtagacttggtaccctggaaagagtctgggcttacacatcttccccctccccccagccccttattctgaaattttaacttcacttactaagcgtgtgcccatccagcacgtccaccctcagccgttgagactgtgggctgtggacctggcccctccccagacctttggtgcaggaagcctggagggagccagaatctattgagcrgctgtcttaggtgattccagtgcccatgcccccggacccctctaaccagccccactctgctttgttgctggatctctgtaagccctgtccccacccccaccctggcaggtttttgagcggagctttggttcataggagattcccttccaggaggaggtgtgatgggagctgctgggcgaaatgcagcacatgtggcctttagggacctcaagagcatgtgaccctgaaccagctctgacccaggaagaagactccacccctgaattccaagtgctccattggatcagcttcccaggaagttcagcttcgggttagtacataaggccaccacaatgctcaagaaattattttagaaaaaacgtacgagttacatttagtgcaagttgaccttatgcccatgcctccatacatggactggttctgttttattaaaactaatatttcatacagattattttgcttgtattttttctctgtgttagttggtgggatagacttctctggggtactcataattcttacatcagctaagaagcagtccatttaaaggccaggcatggtgactcatgcctgtaatcccaggacttcgggaagttcaggcaggcaaatcactttgaggtcaggaattcaagaccagcctggccaacatggtgaaacctcatctctactaaaagtacaaaaattagacaggcatggtggcgggcgcctgtaatcccagctgcttgggaggctgaggcaagagaatcacttgaacccaggaggtagaggttgcagtgagccgagattgtgccactgcactccagcctgggcgacagagactccatctcaaaacaaaacaaaacaaaaaacagtccatctaaccagtggaagagtctgatccaagcatcccctgtccttgcctgggacccccactaccaacaattggaggactgcccaggtggggcccagtcaaccgctgtcacattcctggcaagctataagaatggacccaatttccccatgatccacagagtcaccctcaaaggccacggtcctgaacaatgctgggcatctcaagccacagaatcctccagtcaggcaaaaagcagccaagggtgactgcaaagtggattccactgaggccgtctgggagcccggtcttcctgattccagagcattcaggcttctgcctcccatgagctaagtctgttgcatcaccaacacctttcaatataaacctctagaattctaaagagagttgaattgtcacccttgtccaggaaaatccatccagagttcccgtggtaatgcagccctcccagccagcttctccagttccagcagccaaggccacagtccaagccgtcccatctgcagataaggcaggatcttccctgggaaagcttcccttcctccatttcctgggcaaatttatacaggatcaaatagatccacctcattacttaatgttggtaaactcagatttctcagctgtaaaagagttgttttaaagctcacatcaaacaatagatcatgtttccatccagtatctagcacatgataagcattcagtacatggtggagctgctgctgtggcttttattgatgaaatcgtttttgtcgtttttgtcatttttgtattctgcagaaggtgatcttttctatatactttttaacctggcacccagaattgaaactagccccctagaagcattgtgaccaggacagtgcagaacaatgtttggatccccaagctttttcgaaagtagccaagccccctccctcattcagcatcaggaccatcaacttcttgatcttgttgaaaatttgtttttggtcaatattgctggttttctggaaggaaagaaggaagacagggagagagggaggaagaatgagagaaaaaaagggagggagggaggaagaaagaggaaaaagagaagaaggaacaaagaaagtgagggaaggaaggagaaaggaagggagggagggagggagggagaaatgaacatagaaaatcttcaaaggcctggggcagctcacatcagacttggtctttaaaaataataacgatttttagccgggcgcagtggctcacgtcagtaatcccagcactttgggaggctggggtgggcggattatgaggtcaggggatcaagaccatcctggctcacacggtgaaaccctgtctctactaaaaatacaaaaaaaaaaaaaattagccgggtatggtggcacacgcctgtaatctcagctgctctggaggctgaggcaggagaattgcttgaacccgggaggtggaggttgcagtaagctgagatcgcgccactgcactccagcctgggcaacaaaaagagactctgtctcaaaaaaacaaaaaataaaaaacaaacaaaaaaactttatttatttattttggtaaacaaaggttacaaatgcctaatgtaggaaattttaaaaatataataagagagaaacataaaatgcacacataatttttcctgcagagataattgcagttcccattttacaatatttccaggtagtctttcaggtcattggtattccgtgttctgtatgtgggctttacatctttccttcatttcacttcatgtcataagcagttttcagtgccataaaaattctttgaaaacattatttttaatagctgcctaatattctcttgtaaggatgtgtcataatttattatgggacattgggttcagctttggccttgattgctaattagtataagccaaaggcccgaaarcttcttttatcactgctgttcctgttttaatggttccctgtcatttctgggatcacaagggtgcagctgttctccaggcaaatgttccctgtaaaggaggaggaacttggaggaggccagggagagaggggaaaaagcacctttagcaccaagaggaagaatttcccactgtttggtgacttcccatcctgtgtctcatgtctctgaaagataacatttagtccagaccgagagacaagataaggcctcagcactacagggtgccttggttcctccaagcccccagcacatgccgaccctgctgagcaaggcgggctggtcttaccaaagtgctgactctgcaaatcagccatgaactggacaaatgtgtcccttgctggccctaatatgtaaaacttttagaaggataaataagtcagggcctcattgttacctgatttacaattgcctgtttccccagagcagcagggaacacttccttcgaggcatagtcctgtaaaaccctgaagtgcactggaacctcagctgcttaagtagttaccagcaggccctcctgatctcacagcccctgggtgatggtgtccagagactcagtgagatgtgaggtttacagctctgggaggaatttggccttcctggtgggaggaatgacagatgtggctgaccaagccggctgtgggcttgtgagcgtgcatctttctaacatatgttcaatttgcaaggcaggtgacaattaccaagttattctgtgggaccttcgtaatactcctgccctgatgtctggaatgaggggaaaagagacctgctgagcacaggatgtcattctgtgagcgagtggagacacatgaaatgagaaaaaggaatgcaaaatgcaaagcaaggagaaacgcaaatggacagcaaacctgaaaaaaatatttaaactcacaaggaatccgttaaatgcaatgaaaaccaaacaatcatgctttacctataaaattgagaaaaaatatttgtatagaaaattactggtgtgggcaaaaaagacactcttctatgctgttgacagcggcataaatttgtatttgatcatgagactcaaaagccaacatccgtgtgctttgtgggttattctgcatcttatcacttagcctaaggaaaatatcagaaatgtccctgaggatttaggtagaaggatattcatgcagtattatttgcaatggcaaaatactggaaacagcctaaatgtcccaaaatagagaattagttaaattaatcatggtaacggcacgtgatagaatatcaaacaataactttaaaagttacatttttgaatgtacttttcttttatcacatggaaaaaatatgctaataaaaagtaagatataatgggacctgaattttgttgatagttgatagatgggtagacagatctctcatatatatgtaaatatacattacatatactaactataaaaaacatacttacccacacagagaaagacagagacagagagaaagacagagatggagagatagaaacagagagacaaatgggaaagaacaaagtataccccaaagtacagtctgctagcagtagcctgaagtctttctgaccacttggcagcagcttggaaaatgttcctcactaccttcatggaacctatcatagcataagaaccagcccaaagtaaatggatgggactttgaatttttgtttaaaaatgatggcttgtgcctggtcaaaatggtgtgtgaatggcttatgcattgatatatatcgattggcataagtcagagcgcttcagacctggtctcggtctaagagatcctcagtggagacgtggcgtctttggtcatctaaggtccctgcagcatcacaaagggaaagggcggcatcttctagtgtttacacagcccaacagaaatcctgtgttcttgtaaggaggtgaccaaggtggacctgaacctggattttgtctggttttatctgaaactaggcaatgctgttatgtaggttgtcagaccagcagctctgcagctggctatatgtgtctttgagtaataagagaatcactagaggaattaaatgagactaaccaaaggacatttgattggtatgcagaagtcttcaaaacaatgtgtctcttaagaaaaaaaaaaaagaaggttgtcaatagtgaaaagataggtgaaacctacactttctgcactgcacctgtcggccttccttcctgtctgatctttcaggacccatggagaaagtgtaggtctgacccagaaggctgttgtgtataaagaggatgatgttgcctcccatagagggatgtgaggattgtatatacataaacacagctcaaaaaatatgcacactgtgtgactcagcacacccactcccagatatacccagcagaaatgcttactggtgttcaccaaaagatacatactaggctgctcctagcagcactacttgtaatacctccaaccagaaagctaccccaatgcccattgaaagtagaacggataagtaaattgcggcaccttcgcatgatgggctactattcagcaatgagaatgaacaatctagaaccacatgcaacaaaactattttgagtcaaagaaaccagaaatgaaataatacatgttgtaggattctgcttataatttatacagaaacagtctaaattaatagttcctatactgttaaaagttcacctttggttgggcacagtggctcacacttgtaatcccagcactttgggaggctgaggtgggaggattgcttaaggcaaggagttcaagaccagcttgggcaatgtagcaagacctcatttctaaaaaaaaaaaatagccaggcatggtagtgcatgcatgtagtcctagctacttgggaggctgaggagggaggatcacttgagcccaggggttggaggctacagtgagctatgctcataccactgcattccagcctgggcaacagaatgagacgctgtattgaaaaaaaaagttcaccattgagggtgttaaggcctagaaggaagcctgagaagggcttcagggtgctagcagtgtatcttcctgtttgatctatgtgatggttacataggcatgttcagtttctgaagaattcattggtttctatacttagggtgttgcagttttctgtatgtatattatacttcaatagaaagttaaaaaaactagtgcctggaatatagtgatgtcacttattaacatcattactctaaagctaatatttattggcaaagccctatgtctgaggctagacttgaaaggggaaatgaagaaagagggtaaggaaggagaagaggagaaagggaaagagggatgtggtggacagacctgtagggtgccccctacccaggacccctgcttactggtgcccatggccttgtgtgctcccctcccctcaagggtgggtgaggtctatgaattgcttctaaccaacagaatatgacaaaggtgaaaggaggtatgtgattatatcacacacagcataatcgtgcaggaatttcagttcctggctggccgtgaggaggcaggtagccctgttgaaaaccccatgtggcaagtaactgcagtagcctccagctgactgaagctctcagacctactacctcagagaatggatgctgccaacacatgtgagcaaggaaatggatgcttccccagttgagcttccagatgagaacacagcctggccggcactgtgagtatagccttgtgacaccctgaacagggagtccagctgtgcctagattcctgaacagtggaaactgtgagataataaatgtgtgttgttcaaagccaccaagtttgtactaatttttcacacagcaatcaataactaatacaagggagaaggccacatagccatgcacatgatgggtgcaaaatacgatgatatgaattgaaattatgcccctagatttcaaagttttcccattcaaaatgaccctatgagttggacttcactcccatagtggctgggcgtccatctcccagcagggccaagcctggagtcactatgacagagggcatcaagtcagacacacctgtgtttggatcctggctctaccagcattggattttaggcatgttcctaatgcttccaagtctcaatttcttatgtgactcatggagatggtaatttttttttgtctggcacaaggcacacaacaaaaactagtttttttccttccttatacaacaacatgttactacatatactcagaagcacaggaatcagacagagtgagaggccttctggaacattctatgccaacctgaagcagagggatgaaattaaagccaccacaaaaagaaatggagcaagatttccctcgattaaggctttggacatcactcaattagagggctcccaatctaggagcttccatcctgggaccacagcacacacaaacacacacacacaaccctatacaataaactacaccaactcacacatgcagatcaatacgccagggcaagagagaaggaagcaggcagggcagtttgccaaaggcagaaatctgtgtgtgggatgttgagctgtatttctggtccagtaaatcaatctgccttgaaagggctcctccaacttcatgactgtaattggagctaccttcctcaggggttgtttgttacatttaaggtcaggtgacaagcactgtttttcagagtctgcacagtcactctgcatctgcctctgggaaaagttctagcaatatctggagaatcagctaaaaatgagtatgcctgaaggctgttgaaaagttgggagaaatgcaattgggttaacttctgatttctctccttgtcggatttccaaaactcacttcaacattctctccaggatgcctcccctaaaaccaggatctatctccattaatttgatgcttgttaagactcactgtagcagaggcaccagccccaaactaacccgataataataatggctgctatttagtgagccttgatttcatgccaggtactgcaccaagcaagaatttcccatgctttaaatctacaataaacctgggggccgattactgtacatctctgcttttacagaagaggaaacaaacacagttaggttaaatagtttcctgaggtcacagagctggtagttgacacagtcaagatttgaactgaggtccttctgacagcaaaaatcatgctctaagcaagaaacaacactctggacacacctagtggacaactggttgtagggtcatcaagttccatcaattgttggccacctgtgtagggctatacatgaatgttaaggaatggttccttgttgcaaagcatttacagtctagtggaggacgacaaagaacactcatataagaattattaacaactctagctgcatgaatctgtgtgagcacactagtggaatttggagagacaagctgcctgttaattggtagggtcaggaagtatttctcacagcagaggggactgagctagagtggggtcaaggatgcactagacatgatgagtgaaaagaataaggtgggcattcagggtcttctgggcaccatgtgacaacggtgggatggagggatgggcagagagttcagagccacagtcggacgggatgaggattgtgaagagcaaaggcgagaataaggccggataagagggtcaagctgcagatgccatgccgggcagaaggtggccttcattctacagccaacatggagtttgctggaggaggtatggggattttacacacatgggaggacgtccagtctgttagcctgttaaagtggccacatttgcagtgttggcagaggccaggggacaaactcttgggcttcctcctccccacctcccctcgccctctcccaaggactcaaatgagcagttgagatatggacatgagttgggagtgggagcttctcacttggaggctagagccagatcttcagactactacacccctctgtctgccaagcccaggtgctcagtggagggccatgaacagaggccagcgtggctccttctcatctccataatacagccatgttctctgcagcctcaatgcaaacagctcctcattcacctctgccacagacagaagacggatcctggctgtggaacctggatctgggaagctttagtggcagcacctgtttttggctggaggtgtttgtaacaccttgtaggtattgtcccctggggcagcatggacacctctacctgctttgagactgtggatgacctgcatctcatcaaggaccgaggcagatggggacctgggcctggatttctactacagaagccagagactcatctgcacgctgcagaaactggagcagcccatatttggagttaggaagaagtttaataatagtacacaaacttccttggaaagggctagcctaaaggggaactggttattaggagaaaaaaaaaaccaccgctgtttttacagtaaccctcctcaktctataatgagcaaacctctcttctgtatagagcagcctcctaatgtgagtcactccaagacttggcttccaaccgctgccccttagcccaggaagcaggagcacaatggagcagccaggtgtcaattacaggagacggtcagggcaggaagcaaggtgagttataataggagagcaaattaatttcacataagtaggattagtagttaaataaatagaagtcccaccactaaccctgtctggaatgctgagtgtctgtcccccaccagaggacagaaaaagctcacagctgagcaggaatcaggtcaccacagggttacctacccactgttaaggacgaccccctggaaatgtaaagcaaggacatggtttagaaaagacactctgagccgggaaaaagagatggtatgtagggaaagatgcctcccactgatggcttagtcatctatgacagggccacgatgcagtgtgaagcagctgtacctaagaacagtctgagcagtggaggaggggtcacccaggatttggggtaaattgcgggtggtgaattctaaggatgactccatcaggagcttccattccaggctgagtttgtgttggctttatttttaaattgtcaacctcttgtttgttcgtttgggctttttaaagcttctgtccctttcccagttttcaagtgacctttgttcaggtgagtggagtcctgggttccttgggacttcaggggctgagggagcatggaggggagaccagggctcgaggtgagccaggtcagggcagccgggttccagatctacaaagtagagtcagtcatacatcacagcattgctgtgaggactaaggtaaattaagtccaaagcaaaaagcccctaatgagagttctgacagctggagataagcttgaaaataagcagcagctttctgtcctcctctcctgccttcctgtcatgcaatggagccagagaagagaattcatagcggacactatgcaaaggaggctatacacaaaatcttcctagggcgggaggaactgcctgccggttagggaattctcagcaaggacctccggggaagcttctgagctgcttctgactctgcattggcttaggattttgagcacggtcagggtggatctgcagcctcaagctgtaagaggtagggcagtctaggagtccttaactcaggggttcctaaacttctttgactatatccacttgagtggggccaaaggacacaacgtctcaccagttccccctctctcctgagtttggtaattataggtgtggggcttatgggaaggagaagaggatcgcagaggaaccaaacagacatattgcactaaacctgctgagcaggcagtatacacggttcacttcctatttatgttaaagaaaaatctgccattgtacacttgattttatattataaatgaacgccccatgatctcaaaataaccctactaattttattatgctaaccttgattgcaagacgaaagtgatgaaaaaaaaatagcacaaattcaccggcaaggaagccaccaatgaagtgtccttctataatagggtgaccgaccgtgggagtttgctcaggattctcccagctttagcattgaaaattctacattccggcaaacctctcagtcctgggcaaaccaccatacaagcaaaatataaagggatcatgtatacacctcccttagcagtaggggtacatgagtgatgaattattcaactgcaattcatttacatataatgtctagaaattgcacaattttataataaaagccaaaaattatcaaagtaaatacttattactacccattctaggacaaccccaaactctcgccagactcaatggataatgagggcacaaaaccaatagtaacttataaatataaagtatgaataaaagcggttgaaaaccatgataactcaaaataactgctgaagagctaacgaaacagcgtttttccaaatcttggggaaattccaactatgtaaagtatagtgtagaataacaaattggagtcctcagtaaatcccaggaacactaattttagtttatgaataccaaatttttgtgggttaaaagctttacttgtacataagaagtaaagtctgggggccacctctgtgacccacctggaggaaccacaggaaagatttgcgtgcttgggtcacttcatagtcatcagaatgatactcaggtcccactttgagagtcactgcattagctcaattaataaatgagaaaacagaggccccgagaagtcaagtgacttttccaaagctacaggtgccatgggtcctccaaggaaggttctctgagggctggagaggtgtgttagggggcagaggtaggattttaaaatagtttgtctgtcttagtcactccctccacatacatctgacatagtgaaagagcactggtcctcttgaaccctcatagggcttgttagggtctaattgtgtcccccaaaaagacatgttgaagttttgaccctcagtaccaatcaacgtgaccttgttgggaaacagggtctttgcacatggagtcaagatgaagtcctaaggatgagccctaatcctatatgatcatgtccttataaaatgagggaagttgggmcacacacacacacacacacacacacacacacacacagtgccttatgaagacacagacacagggagaagacggctgtgtgaagtggaggtggagatgggcgggatgctgccacaagccaagggtgtctggggtgaccatggaagaggcaagaaaagatccccccgccaccccccaggaggtttcagaggaagtgtggctctcctaacacctcgagtgtggtcctctggcctccagaactgtgggataataaatttaaaccacccaatttgtggttctttgtcataatagcccagaagacaaatacagagactcgcagttgctccccgtgcctggcctgggtactctccttctcacactctctctgcagctggttgggagcaaaagcctcagggaaaagtacagatcctctggtttctctttgccatgtctcctccatgcctgccttagtagcatcagagagtgtgcccctgggaggggacgcaactcgggcatggagcgggtggcccagtatcagagaccgtgtcatgcaacaggagggcaggggagcccggctggcaccccttgtccctgagggtgctgggaggatgaatgcctcttcccggtcaagtgcttccagcagagacacttgacattttcctgtccacacaccatttggcaaggacgagagctccgatgggccatcctgacctttgctgtatttttctaggataaaagcaaag

SEQ ID NO: 95253 - DNA, 32491 bp, Homo sapiens
gggcagatcacttgatatcaggagttcaagaccagcctggccaacatggtgaaaacccatctctactaataatacaaaaattagccggacacagtggcatagacctgtaatcccagctacccaaggaggctgcagcaggagaatcgcttgaacctgggaggggaagtttgcagtaagccaagatcacaccaccgcactccagcctgggtgacagagcaagacttcatctaaaaaaaaaaaaaaaaaaaaagaaaaagaaaaagaaaagaaaaactaagatgatacaagactgaagatatctgtgttaagttcacgtgtacctctctttaatcaatacctctgttcctgaaattatttcccatggaatatcaattaattccagacataattcacaaatagtggatttagggttgggagtggctcctaacacttaagcattcagtttggctatgccctcaaatagtcagtgatcttcccaaaggggccaagaagaagcaaaaccctgggctaggaagaacattgttctcctgcgaagagaacattgtagcctgggaagttcccaggctagcccactaaggcctgttgacctcatccaccatgggagatgcaacacagttactacaccagtggctttaaaggacccaggaaaacagcatagaataagaaatgtcttttaatttaacttgtctggtgttgcttaaggaaaaaggggttcaattactggcaagtgagaaggttggtgcagacttgcatgagctcccgaagggacctccggggctgygtggctgtggcactgagtcttcattccgcctcatttccccccagaacttatgactttaatttacctgaatagaagcacatccaggcgctgcgcctgtgtccagctgctgagacagggaaagcggggttctgcaggtggcactgggggtgcagggggaagagggaaattggcagggggagatatattcttaagagaactggagagtggttggaggtgagtttagaaagggtgtgtggccaggacggagaggggagaaggtggggaaggcagcagggcaggaagaggtcctgagaggagagaggaagaggaggaggaggagggggagaggagagccaggacactgagcttccccaggcaaggaggagttacatatgagaaatggggtgacatcatgtgtcttcctgaggggcaggaagagactctggggaagaaatgtgtgttgagcgattgatcttacaaagtccaaacttctctgggaattcagggcatttgtgctggcattcctggaggtggaagtggggaatctgagtcctattctctgcctttcagtagcttagagcttattaaactccttcctgtcccctcaccccaacacccttatcagttcctgtcccccccacctcctacaaaaagttatgactgtgaagcgttaaaccagctcaggacagtacctggcaagattaagattcctgtagcccaactctaaccaaatcccactcctaccccaaccctctcggaaagctgcagcggcccctcctacctgccaagctaaggcccttgctcaggtggctcgcagctctctaaaggtaacctggctgggctgctcccccttcaaccctctccctgccagcatcttcgacctgagcccagaccaaatgcctctgccttcctctcccgcctcgcccactcgccgcactgggggcatcctctcctctctttcagccatggagcattgtgtgtgaccctaaggaggctcagtgactgagtagccccctcactctcccccagggcccacctctgagccacattcccaccttcacgtcacatcctctccccgccccatacacacatacacacaatcccacttccatgctgcccttagacctgggcaagggtccctgctctggtcctcctgctacagagggcatcaccgtggcccttgtcaattacactccctccacgccccacccccygtcacagggcaaggaggaacttccactcgattttcaaacccatgctcttggaattctttgcccaggaggccagagcccacttctagaccttcctcttgagtgcagcctgtgcctgtgccagagtgtgcacccaggcatggggcagccacaggacagctgtctgtgggaggtctgcacagagccgacggtgttgcatgtctgtcacagcagaaggccccttgctgtgtgggatgggcagaatatggtgcggacggacacaccagggtgcaaggccagaggcagacactcttgtcatagcgtgttccatacagaactccgaggagtggaaagttgtgaatgcaaacctgaccttccaggtctttccaaaggtatatttgtcaaggtgggaggctagaccatgattgacttaacaatggattcatttggttgatggctttaaaatacttgactcatggcataaggcctcccttgagtcttgccctgggccctgcaaatgctggggtgggcctgtccagctccaaacttgattgacttatgcggggtttctgaagctttcacagaacaggggagagggtgactttgcctatcacaaacccaaacttcctagaatttctttttaaccagctctgctcttccgccaaatttcctctccttactgcaaccagctcatctctcctttctccctagaaaccgtatccttgactagcccctccaggcttcctagatccaccctccccacttccccaacttcatgatcttacaaaaccctctcagctcccatcctctccctgaacaaaagccctgtttctggataaacagctctcaacaaaggagaagcctgtccttggccaaaatggcttgttctccccatttgtcctactttctgttattacaatctacgttccatcaagctatgtctttgagtcatctctctcactagacagtgagctccttgagggcaaacactgtgtctggtttggctctgtgactcttccagcaccttctactttgagagcattcatgcaagttttcatgggagatatcacggaggagttggaatcggagttaggcctgaagggtaggtagaatatggaaaatgaagtgagtagaggcaactggagattccttctctcctgtgggcagtagtgagcaattaaagattcttgagctagagcaagacaacactttagaaagactgacgtcaggaacagtgagatgcagggaaaaactgagagcagtttgggggctgttgccacagcactgagtgttagaggaggcaggaatgcaacggcaggacaaatagatgcaggaggcagtaccttaggcacagcaaaataacttacccgaggccacacaattcagaagcagagctagaactcaggttgcccagttttaaagctgtacagtttcctccatactgagtcacagaggagatgaggctagaactgagtcctgaaggctgctgaggaggaagtttgccagcaggcatgggcactgggcactccaccagggtcactactaggttcaaccaggtgcaccctggaggccaccgctttctgcaggagattctggccttcccacttgggaggaaagtacagaccctgacttaggcaggaagggagggttgagaagcaccccatggggaagagattcatgttagctcctttccctgggaggaggcagggagaggtgatgcttacacatccaagtccctgggtactggctgagggatcaggggagctgcggtaactccagacacctgcatggtgcttcacggcttccacaacatcgtaaagtgttattcctgaccactccactttcccccctctctacccagtgtatcagatccaccttccaaggcacttctgggaaggcttcaaccctcagacttccctgcccagcatccacacagccctgtgctttcgccgtcattgatcacttgctcccatctgcagataacagctgtgtgatgttggccaagtcacttaacccctttgtgtcccagtttcattgtgtaaacaggagatgatgaaagcattgtccaccggtttttcgaccccagccagccatgatgatgataatggtgatgatgccttgtcctgctggttgattgtggctctgtctcccccaccactctgcaaattccttgaggacaagataggaagcacctctggcttgtctgtatcaccttggggaccagaaactggcacgcaccgctaggtccatttattcaatccgtgagcacttctggagcacttgctatgtgtcaagctctgtgacaggatctgggtttagagataaataagaagctcgggggtgggtgggggtgtccagagttaaggcagacacagaccattatataaagagtatggagagggtcacaggcgctgggctgaggccgggtgaacatagccaggcaggagggaagaagagggctttctcaatcaaatgaaagctgattgagatgaatccagtggtcccatctgacccctacagcaatcacatttaaggatgaggagatgacaactcagccgagaaaatcccactgttagtacgccatgggctggggctgggaccagagcccctcacttctcagggttgggggctcacagcgcatgccttagagatccccacttccactgcttcccagccttggcctctgcccagagttgtgcaaattaaaggacttccgggcaacatccattcattccctggtctctatcctccacccgcccctgcgctccagggtatttttagttctgggcagccaggcctggtgagtgattggcagcaggcagagcccacgtttccgaaccctctgtgttgcttctggctcagcatgaraggtggctgggccctaggagagggcttaggcatacctggcacccaagcccacagctgcctcattgtccctgggggaggagctgggctgctgccactgacccgaggctgggagcattctttcctgctgattcatcatggggaatgttttgggcccagctggggtggggcaggggcactggggggacatcttggacacgggcagccaggagtggatggcaggtccctggcagcagggtcattaakacctggctgtcacccaggatcgaaaaggtccatcttgacatcctagctctatcacactctgcctgtccaggcttattcttacttgcacatctgcctcccccaccagactgggaaggccccctccagcgtctagcactccagcaccctgtctagcatgtaggagaaaatcaataaaggcttgtgggatgaatgaacctttggaaggacgtttaggcaaggtgggggcaagagggggaaccaggttgggcagctgtgggcctagggaggaaaccgggaggctggaaccctctgcccattttacagatggggccagtgaggctaagggcaggaccaggtctaggggaaagaaactgggggcttggactggggttcaggcacctaggtgctcagttcagctgatgggactcctctctgtcagccatgtccacatttctttaattctacagtccctgctccctgcactaacaccctcctcccgtgagtctgacaagggccaggactgcatcattcagctctgtgaaggggttctcccattcactgtgtattgcctggaggagcaagttatgtcgcctggggctcagtgttcccagctgcacaatgggcagcgcagagtttcacacggagggcggggggtggggggcggtattcagtaaactctgggtgactcgcctgttcctgcaggagagcaccgctgcaccgcgccacctcgacctctctgaactgagccccggcctcccagaaagggcgtctacattgtcctaagtgaccgagctcgtgagattcggcccctgtgacagccgggcgctcccgtgcgaagggtgctgtgccgggggccctggcacccaccaggactcacagactgggactctaggtgggcgtcattaccttgttctgcaaaagaggaaactgcctgggagagggactcccgaggccgccgcggccctccctgcaaaacagccgcgggcccagcgccgccctttcccgagagctccgctccccgcgaccccccgccgcccccccgctccccccgccccccgggacttcccggccccgccggctgcggctgggcgcccccgccacctggcctgtgtcccgacggggggcgccgcgcggaaggccgggcggggcgcccgcggactccaggcccgcccggggcggggcctgcggggcctcctccgcggccagctcggggctggggggccgcgggcgggaggcggataaaaaggccccagggcgcccggggagggagcccgttagcgctgctccgccgcggcgcccgcccagccccggactgtccgcgctccatctggtgagcccccgcctggccgcgcgtctgcctcttggtctgcctcttgctgtcccatctgtccttctgtctctctgtgggtctgcaggcctctgagggttcctggagactgggcctagggggcatgggggatcccttggaccctcagcccggccctccagtcgctcaccaacctgcttccaactggacaagtgaccacgctggggagcttggcccaaggcccgccctgagtggtgcgcccaggcctcaggggtgcctgcgtgtcttgtttgtgtacacgccgtgtgtaaccattgctctgccttcttccagggaggagacagggaaggggcaaggcgggttcagatgtcacacttacgacttgggggacaacgaaccagggctgatctgggctctccaactatccagaccggagctgattatgttggggggtcggcgtgtgacagaaacaccgaagggaagggggcagaagacttcaagccccctctttcctagcctggacaggtacagctcagagaccatttgttggcactgcttcaggtccacagagtcagtaaccccggggaggctacagggctgagaggaggctgctgagaagagctgcccaacggcagagaagggatgagccatcctaaagttgctgcaccctcaggacagyaccccccatgctctctcttgaatactcgggcatttgctgtcttcagccctccctacctgcgctaggtcaggccaggtcccagcatctcctggcacacctggagcaggtgcctctgtgcctcaagctggcaagatcttggatctgtcactcggcattcagcgaagagcaccctgcccagtgccctcacaccacggcctgggtcataaatccaccagaacagggtggaatttcagtcggctcccggccttcctttcctcctccccctcttccaacatccattcttggtggttttgagagtccggcgtctagccaggctgcttgggtttgaatcctggctgggcaagttacttgacttccctggaccttaccttctcatctgtaaaatggagataagtatttaatccgtattttaaaatgtatagttattatcctcacttccctcccctcctctttcccttccaccttccttccctcttctgtccccttctcctttatttgggaaagtaacggccactttcgaggccgcttccttctctgagggaggatgcacagcttggtcctctgtgctcagtgctaggggaacagacaggtggagtctggttgtggggtcaggaagcaaacacacaatgtgctttgtggaaggctttgtgggagggcttaatggagggggtggcatttgagctggccttgtgggatgtgtaggagtttaacaatcttagatagagggaaaggaacagtgagagcaaaggcttggaggctgggagacgaaggctatagtctggtgtgagcaaaagctctcgggggcctatagtgggcaggaaggccaataagagggrctctccctgcatctaactcttggttcccgctgccgtccccccaccttccagcagcgttcatggaagggagcttccctggcccagaccccagggtcctacagcagaagccctcccatgccctcaggttggtcccttggagaggaaggagctgctggcctgggactgtccacagcctgtaacaagacctcctcagtgtgtcagggacttcagccaggagccaaacagcagacctgcccagcctaccctgggccccatcagagcatgtcggataggggggctgtctagtgccaccccctcattttacaggtttttcagctgagactcagagaaaggaaaatatttgactccagacacaatttggcggcagagatagaagcattccaactcctgggggtggtagagaaggtgtggttgtcactcagcccagacccatgtgaccactgggtcctaatagctgagggacctgaggccgatctgtcccatcctttcttgccatctggggagtggtttggctcagtccctggctgtctacctcctactccagggagcacggaggagggaatgggaaacaatggagagcactctgctcatgggacagccagctgggagcccccacaagcctctgagtgacatgcagaagacagtgtttcagtctggaaaggaagcgtgggaggggtcagagggggagagctgcagaggtgagaatgggaaggcagcccctgcacagcctcagggagtggagaggggagcatctaggctctgcagtgtgggtggagggaaaaggggcaaatctagagaaggctgcaaagaggagtaccaaggacttgcagttgagatcggacgtggcctccatttccttctttgtacagagaggaggtgggaccaatctagaccaacggttctatcgtcrctgtcacagtagctgttaataatagttcattgttactgaaggcttgctcttctaagggtttaatgtttcttcacttaatctttacaaaaatcctatgaggtagttactattattatccccactttacagagggagacactgaggcagggagaaactaaatcgctggcccaagatcacttccaaatgaactggtggaggcaggattcgaaccccagcagtctgaccgcccagcctgtgctctcaagcactgtgctgccacctcccatccatgcaaccacagatatgaatgagtgccacctacacayctgacactattttgggaactggggacacaacacatccccactcccatggagcttcattcccagaacttgtttagtgcacttttaggagcccactccacccagccctgctggccaaggccgttgagagggagtagggcagatgccatccatggaagtgagagtggcaggggcctgtgagagcctccccactcaagcggatgagctgcatgattccccaagaggagccatggccgtgggaagaggcaggtctcatcagaacgagctttcttagcccatcttctccatcccctgttccaggtcggccttagcttccatcggcagcagagccttggggtggaggagcttcagcttcggtggctccagaggtctctgacagctctaaccagctgagactctctcctctatgcccttctccacctgctggtcccgggaccaaggctgctgtgtgagggggagaggacctgcccccagcctcatcccctctctaaggacccaaagaacgtctgattacagcctcctggagacaggggccctctctgtttaccgcctgaaaccctcccctggcccctcgcttcctacaggatgaaggcaaaccctctgtgtagtacacatggcccttgatcattggccccagctcgtccctccatctctttmccctccaaacccccacactgtggtctgggggtaagagaagggcacttcctgctcttgcacaaactcacctctttccctctttcctaatcctcttctctgtatctcgaatgccccttttctcacccaggagaatcttatttgcccaataaggctcaggttaagtgtcccttctttgaaaggcttccctaattcttcttgcttgagcttcatgaaggtagggagggtgttcgatgtcttcatttctgtgtcccagcacctggcctgaagcaagtattccaaaaatgtgtattgaatctacatgaatcatacgcctagatggatgtgaggctatcacagggtatccaagctgcaggagggatccagatgatatgtggttccatctcctcactttagaaataaagagtcagggccgggcacagtggctcacacctgtaatcccagcactttgggaggccaaggcggatggatcacgaggtcaggagttcaagaccagtgtggccaagatggtgaaaccccgtctctactacagatacaaaaaaattagctgggcgtggtggtgggcgcctgtaatcccagctacccaggaggatgaggcagagaattgcttaaacctgggaggcggaggttgcagtgagctgrgattgcagcactgcagtccagcctgggcgacagagagagactctgtctcgaaaaaaaaaaaaaaaagaaagaaagaaagaaaaaagaaagaaagagtcaggacctagagagttgaagagacttgcccaagccatgcagccaatgagtggtggagtccttgatgcccatctaatagccctttctgctccagccttccatgtgccttctaggtgaaggcggcacttcacacatttgattagggtgctaggaacatcagaaggtggtggcagtgtccctggggtagatagtcttgacctgagggcaccctgggggcatccccgtgactcaaatggtggaccacctcgtctacctacacataagattttaggtgtataagagctgctgtttattgtgtactcaccaatgctaggactttgctaagcactttccatacggtgttttatttaacactcaacaacaccgtgagatggagattactatccccattttacagatgaggagactgagactcagtgaggttaagtttaaacttcctcaaggtcatggcgaatgtggtggatttgaaccaaatcagctaacctggcccagactcaattaatgccactgtgtgtgtgtgtgcgcgtgcacacacacacacatttgaggggggttttctttcctttgtcttgccaggagctgccaaattgctgcagaggtctgagatctgggtagaggtggtgatcactgtcatgtttactcattcctcaggtatcttggcctcagctgtccttgaagtcaccatggcgtggtccccaccagccaccctctttctgttcctgctgctgctaggccagccccctcccagcaggccacagtcactgggcaccactaagctccggctggtgggcccagagagcaagccagaggagggccgcctggaggtgctgcaccagggccagtggggcaccgtgtgtgatgacaactttgctatccaggaggccacagtggcttgccgccagctgggcttcraagctgccttgacctgggcccacagtgccaagtacggccaaggggagggtgagtgactggtgccacctagtgggatggcaaggagatggtaacagtcttctcgggctgggctcactgacacccacccatcctttaataccctgctcatgtgacctcctccacacggcatttcctgagtgcctcagctgcacatggcccctactcccaccctcccattctctcttgtaataaggccaccgccgtcaccaccactaaactctaagttccttgaacatagcaattggcacacagtgggtgcttagagaatgttgaatgaaaaaatgggcaaacaggtaggtctgattcctagagctacccggcattttccaaaaacagattctctaagagccagcacccaaaggaggtagcaggcagggttataaatacttattccccaggagacccaaacttcctcctccctgccactttctcccagggtttggaagaggtgacttggtaagtgtggggtcctatgcaggaggcagagcctgtgacctgcctctctgtgccatctttgagcatcacytccactccacaggacccatctggctggacaatgtgcgctgtgtgggcacagagagctccttggaccagtgcgggtctaatggctggggagtcagtgactgcagtcactcagaagacgtaggggtgatatgccacccccggcgccatcgtggctacctttctgaaactgtctccaatgcccttgggccccaggtgaggaggctgttcaggctctggtctgagccaagggctgggtcagagaacagagagcytcccagaagacgggcctagaggataagcgaggggaaagggtgcagtctgcactgagcatcgtccccaggccgccgactcctgagtgtgccctgcagcaggtgcataaatagagggccccagcctgaggcaaggcaggccagaggaccagagctgaccccactgggaatcgcagaagctgctcccrtaagggagacagcaytgggtaaggggctccctcatccatgaggcctggccacaattgctgcctcttcccagcacaaacaaccctgagctaaaaacagcccaagccaaacaacaggagcgggcagggcagggctctgctgccaggcagcctccagcctcaggacagctggccatggccactgaatgcagcgtgttgtgatggggactctgtactggtctaagtcatcccagggctagggttgggggttcttgtgggccataggatcctgctgtggtctcaagcagctggtctatgcccatctcagctctctcagggtggtacagagaaggcccttccatgcccagcaaaagcctcccaaactccaagggctcccatcctgatcccagcgggggccagatctgcctagttctctccaatttgacaaattcgaggaactgagggaaagggcttagacaagctgaggttctgccttgcacttactctgtggcctttgataatgcctccccttctctgggcctcagtttcctggcctgttcaatgaccgggctgggtgggatggtctcgaaaagctccaagccccagcctttctgcatgaagatctgcagcaggctccactggaggagcaggagccccgaggcccacaggtgactgtgcaccccgcagggccrgcggctggaggaggtgcggctcaagcccatccttgccagtgccaagcagcatagcccagtgaccgagggagccgtggaggtgaagtatgagggccactggcggcaggtgtgtgaccagggctggaccatgaacaacagcagggtggtgtgcgggatgctgggcttccccagcgaggtgcctgtcgacagccactactacaggtaggagggcggctggcgtaggccccacaggaggcagggttgtggggcagggactgagtgtgtgttcatgtgcgtgcatgtgatgtagggtgtgtgcatgagtctgmgtgtggactcatgtgaggggcaagtaagtatgcacacaggcgagtgtgtgatgtgtgtggcatgtgggacctcgcagagttcagtgagtactgactggcagtggtgttgtctgtggcaggacatccagcaggtgttgggattgggggagagaaaacaggccctactgaggaatgtgcccagatttcttgcttcacgggtgcctcagaataataaacaggaaagtgaataaggaggaccttcaggatcctgggaaatacctagaaacagtcagaaaacaaacactgcactctcgaattatgtaaacagaattaactaggtacagaacgcccccccaccccccgcccccggtgaaaacagttgaacataaaaccgcgtgtccttggttaaaacactagactttcctgcagatacttgcagtgacacccacgtgtagagtttagacaaactgttctggcctcagctcagccagtgactggcgttagggctttggggagggcctctgagcctccatcctcaattccactgcgaatatcccaacgcttccctcctgaatttcctcagctctgatcaagccaggctgtgactgggttgtgtgtaagtgaggcgtggggtggggcacctggagagaggagacataaaaatattctgtcagaaacaaggcggaactgtcacaactgattgcatcaaccagtaaacgacagccacagtcatggttctgccagatccgtgtcagggaggacttgtgtgtttcccatcaagtgagaagtctcccgtagtacgtctgagtcatctgccaccccaatcagtttgatcctgcttccctaaagggttagaaggcccttgttgcagtgacttagaggaaccccgttctgaggaaacaggggtgctggtcagcccctggctccatccttggggatcctgggatgcagcctgactccccctgcctggtaattgcacacctgggtctcgctgacttgcctgccacccatgaggagggcaggcctgatggtagcctgggtgtctctgggcgggccgcccccaccagcaaggccttcacctcccacctgtccccagagggccccttctcttgggccctccctaaatgctccccttcctctggacttcggagagggcaagcctgatccacctgcccccactctaggactggccgagggaccttgcttgccttccttgtaaaatggttatttgtgaggtggccaccccgtcagggctgctgtgaagctcagcattgaaatcagattagtgaataagtttacaaaatgtaaagtcctgtgcaaacttaaggacaactatgaggaaccaggtggcagggggtgggacttccacaccccttccacctcctatctgttttctcccataacaggaaagtctgggatctgaagatgagggaccctaagtctaggtgaggagcagcaccctagagggaggaggcaaaggggtgtggcatgaagggcctctatcccatcccctaccctccccttccctcctttctaccttggcctcccttagtmctgaagctcttccctcagcccttcctccaccctcagtctcccttgtcctctaggctgaagagcctgacgaataagaactccttctggatccaccaggtcacctgcctggggacagagccccacatggccaactgccaggtgcaggtggctccagcccggggcaagctgcggccagcctgcccaggtggcatgcaygctgtggtcagctgtgtggcagggcctcacttccgcccaccgaagacaaagccacaacgcaaagggtcctgggcagaggtgagccctgggcatyctgcactcacaccacagcttggaggcacgggcgggacactgcctggtggggggtgcggggaggtccaggacacgcaggagagaggaaccagactgggaggaggagagtgaatcacagaaytgtagaaccttggaatgtatttaaaagggatcatttatagmcctaccataaatggaaagctgacatcacccgccttgaatagaaggtgaccgtaaaaacagtaattaaatcctaactacattccactgagggctggtactgatcctgagcctgctcctgagcctgctcctttgttttaaagaggagatgagcaagtgcttatgaggtggtagagacgcctcagtgccaaactgagatgccctcatgaggtggtacagatgccgtgaggtggtacagatgcytcagcgccacactgagatggcctcgtgaggtggtacagacaccttagtgccacactgagatggcctcgtgaggtggtacagataccttagtgccacactgagatagcctcrtgaggtggtacagacaccttagtgccacactgagatggccttgtgaggtggtacagatgccttagcgccacacttgagacggcatccttgatgaggctgtgggggtgattggtcattgaagaaatggagatcaagaaaaacagcttattcagggtgacagctatgggaagtcagaagcaggactggaactccccatccttggctctggccaccgccatggaacttgaaggagccccgttggggatcccgctgtgggggctcagcccctgctggtgcctcctcctcagccgtccctgaagcaggtttctcccagcaggagccgagggtgcgcctgcgctccggggcccaggtgggcgagggccgggtggaagtgctcatgaaccgccagtggggcacggtctgtgaccacaggtggaacctcatctctgccagtgtcgtgtgtcgtcagctgggctttggctctgctcgggaggccctctttggggcccggctgggccaaggtgagtgagacagcctgggaggggttagaaggcctggatatgccactggtccatgtcttgaaggccctggggtgacagggccaggacagaaagttatccccctctgtgaaggggaagccacaagtgtggggttacggagatggagcctcgcacacagcacctctctccccatctagggctagggcccatccacctgagtgaggtgcgctgcaggggatatgagcggaccctcagcgactgccctgccctggaagggtcccagaatggttgccaacatgagaatgmtgctgctgtcaggtgcaatgtccctaacatgggctttcagaatcaggtgagtttgggtctgagcatggcctcaggctgggggccgggaaaccctggggagtccccaggacaccacatcgagctagcggggagaggtccaggaggagcggctagcgcttctgctttgggcaccagtctgccttcccttagagccgacctggctgcagcccctccgaaatgtcagaggccacaggggctctgcagatggatgtgctctcccatacccgtctcgggtcccctgtgaagctgagaaagaaggtgcctgggaaagagggccacagggctgtcggcacgagggagtctgtgtgggatgctcagggcaaagtgtcagtgctaacatggactgtgagcaagtcactggtgccactgtaaaatggggttcacgctctcagggggtcactgtgaatgaggcaagggacatgaaagccctttgcaaattgccagttgtcgttaatggtggagggcaagtgccagagcaggaggagcccctggtccaggcactttgagtcagatttctctagcaggcagggacattagagactacctgctacactgtcctcaccttacagagaaggagaccaaggcagagaaggggactgtcttgtctagggtgacacagtgagctggcttgggcagacctccaggctcgcagccctgagctcttccctgcaaggctaccccactcctcacacacccctcgccattgcaggtgcgcttggctggtgggcgtatccctgaggaggggctattggaggtgcaggtggaggtgaacggggtcccacgctgggggagcgtgtgcagtgaaaactgggggctcaccgaagccatggtggcctgccgacagctcggcctgggttttgccatccatgcctacaaggtaggtccctctgttgtttcttccgtatgacctctcaccctcctgttctgaggcccaaaacttcctgtgctaaagctgctgcctctttgcccatttggcaattcattactgagtgaaactatgagccgacatgatgctgagtgctgggaacagtgtggtaaacaagaagacatagtcctaatgaaatcgtcaatgagrgacacatttgcatctgcaggaaagawgaatagaaattagtcagacaaggtggaggaggaatgaayagcttatgcaaaagccctgtggccagagaaagcttgattcagctgaggaaatcagggccagggattgtagtgtggctstctctcgagagtgctgtcaaacatgagggcagaggaggcaggggcaagatcactcaaagcttgcaatccacatgtttgaaagatttcttcctttgctgtttggaaaacgttgggtggagattaacatgaatgcaaggaaacacactcaggaggctattgtagtagcccaggtgagaaatgaggctggactggaccaggtagtccaggagaaataagtggatagatctaaaatacatcaaaaaataaaatcaagaggacttaggcatgaccgcaacagagaaacctctgcacttgcacccacactggctgccgcacagtgtggactgggcaaccctgagcacaactgacgatctgggccgcttgaggagcagctggggaaatgtgagcacagcccccagggagaggggcggggaacaggaccctcctctgccatctggaagagagaggggtgtagggccagtagtggaagccacggtgggtggatttttacctccatatgtggtggggatttctaacatcagaagggtccaaatgtgtcatggactgccccagggaattcgggttctcatcactgaagattttcaggcccaggmtggacacaacccggtgggggtggtatgactgaggccacasctcagatgggagtcaggaggtgactccaaaggcacgctgactgggtgacgctggctgtcttcttaggaaacctggttctggtcggggacgccaagggcccaggaggtggtgatgagtggggtgcgctgctcaggcacagagctggccctgcagcagtgccagaggcacgggccggtgcactgctcccacggtggcgggcgcttcctggctggagtctcctgcatggacagtgagtgacggagggctcacagggctggggacaggtaggcctgtgctccccttcagggagggccctgcatgctggtcccaggtctatggccagcagcatgggggaatgaaagtaccagctctgccatttcccagctgtgtggccaaatcacccatcccatcaggatccataccctgccccctcacggagttattgtgagaaagaacactgagaacatgaggaagcacaaggacacggaacggcggttttcaactttgggttatgaccaacagttacaaacaatgaaacaggacagaaaacagcaagggcagtttttccttggaactatgtgtatactgggttacagcataaaatgtatttcttactgtggtttgtagtcagaaaagcagtttgaaagctgtcgtagaggacatacaaatatgagcacacccggggccaaggcccagctgtgtgttctcttcctgagctgtgggatttacccaaaaagactttgggacaaggccatctgtggcattgctctgccccacaaacccagattcttagggcagcagcatctctgacatctcccagccaggtcagtgccaagatggactatatccagcccaaaggttacagatagcatcaacccaagtggccacttgaccttgttcgtggccaaatttcgacaccaagatatccttcatctttgtcagtgagctcctggcttcctctctgtccagggcaccctggggagaacactgggcccatccatcagaccctcccctgcagggatggggcatgagagtggacctccccatcaccaaggcctcccagcacgtggggagcctgctcctcacttgactccccttcctgggaacctcgaacccctccctgctccactgcctacagtgggagcgctcttcttgaacacatttgatccttcacgacaacttggcacagtcagccaatctgcagtctctgtaaccacctgtttttcctccctggcttttcacattgctttctttcctttactctctcttctcattctctctgaaagctcgccttctttcaccaagaaactctaggtttgtcagtgggcacttcctggctctctccaatatataccacaggaccctacatggccaactgccagatgcagatggctccagcctggggcaagctgcggccggcctgcccaggtggcatgcatgctgtggtcagtggtgtggcagggcctcacttccgcccaggactactttagtgatagtgatttttagtgacagtacaggcaaagtatccaggttaggtatcagcagagctttttgagaggattatatgaactaagctacataaaggcactttacaggcttaaaagcawtttacaaaataaatactagcttcaactgcatgtttacttaggccagacatgttacaggtgtcatcagattaatatcaccattatcttcatcttacagatgatgaaaatgagagacaaaatggttaagcagttatagagctagtgaattatacagtcagaaartaagccaagaatgaacccaggtggcctggctccaaaaccagcaagcctaaccatgacactgtagctgcctcccaggttaaggtgatagacttcctttaaatgttattagaactcaccatctcctgactcttaaaactgcccttcttttgtggggtcctctcggagggtttaatctgggggcaagcttgccctctgtgctggagactaagactggctgcctttccaccctttgagtcactgccatgccctccrccgccccaggtgcaccagacctggtgatgaacgcccagctagtgcaggagacggcctacttggaggaccgcccgctcagccagctgtattgtgcccacgaggagaactgcctctccaagtctgcrgatcacatggactggccctacggataccgccgcctattgcgcttctccacacagatctacaatctgggccggactgactttcgtccaaagactggacgcgatagctgggtttggcaccagtgccacaggttagagcctgcccatgcattggcactagagggttaggaacaaaaagcagggtccagggagcagtktggcccttccctggccacaggcaagttttcctgggaggggtgtgcgctctccttgctggccttgcctgcaggaggcagtgaggacagcggcatccacctgcccctccatcgctctcgccttcactatgtcaatggtgcccgtggggtctgtttcccacagcaacatcccatagaggcgtcaccgccagcagagttgttctgttagaatggtatttgacacttttcctatgttggatcataggccttgtcttcagaagccaggtaaagtggggactcccaggaacctgggggcccaaaatagacatcccatccagggtgctggctctgcaggaaaagctcgctgattccttcagyagtaaggcaaggccctcaaagaacagcatgaacagactgccactaaaaaagtgacaatgaacattctttcctatcaggagcttccagaccagagagagggagagacaatgcctgtgacaaaggcagaattgttttttcttcttcagaacayagccacgggtggagaaagtggaaaggaatgggcaatgactttgggacttggtctcgcctgagataataagcacctttccctgtagcatgaacagagctgtcattataactggattggaaacaatggtagcaatttggtcccaggcttacagggaccctcttcccagcaggtcagctcctaggctgctcacagacccggtgccccgcctctccccccagttcaggccttgctgtcaggcaccagcctcctggaggcgaccagagcagggcttctacctcttgcctgggttgagaccctaggtggtgggggcagctgtacttgctgcctggcaggggtgccagcaaaggaggctgtgcgtcacactaatctcgggtttgggagggagaagggcactgcctactataactttcctctcgggtcatgatggggcctggggcctgtcttccctaccagcccctccagagaggaccctctcctgttgctgccgcactgacagctctaccccttctgcaggcattaccacagcattgargtcttcacccactacgacctcctcactctcaatggctccaaggtggctgaggggcacaaggccagcttctgtctggaggacacaaactgccccacaggtatgtggtttcctgtcagcacctatcagcatctccttttgttatgttcttcagcccctttgggatcaggctttctctctgccctgttcagcagcccaaggcacctggagaccctggcttgaaaagttagcattcaaggyaatttcttaccttctgaaatcttacgcaggaggtttttacttcctctgaattccccacgcattgttcttcttttaaaacactcagcactttccatcttggagaagagttgcagacctgtcctatctctgctgagctctccgagggcaagcattgcctgcttcctgtctgcacacccacagtccctaacccttaggaactgcatggtaaacactgratctttagaggtttggaaggatggataggcggatgcacaagtaaattagcacgggagcgttggaatctcccaaccacagttcctagttcaacagggatttgcactggagcagtcaaacaaatcctatctttgtcacaatgtggtttgctatggtgctggattcacagcaggattctagctctgacggtccttaatctgtgaactgggcatgatgacactgaactggtaaaggaaataaaagacctagcagagtgcttcgtcctgcctcaaaacctgtctgtccccttccttacaggactgcagcggcgctacgcatgtgccaactttggagaacagggagtgactgtaggctgctgggacacctaccggcatgacattgattgccagtgggtggatatcacagatgtgggccccgggaattatatcttccaggtaaggcggctgggggattccccacagagcctgatttcctccagatgttccacaactttccctgagggcaaatgaagggaagaatttcccatacagggtttccgacaggcctgtcacttaaaggagctgtcctgttagggaagtaacagtcaagctgggtccaatgaacctgtgtttgagtattgattcagtgaacactggataaatcwgtttctcagttgggacttctcagtccctatctgtaawatgggaacatcagtacctacctcctgggtaattgttaagaattaatgaagcaaatagaaacacatgtaaggattatcacagccacagtcaactcattcagaaaccaaatcacccattttcagttgtcccctctttcactctaggtgattgtgaacccccactatgaagtggcagagtcagatttctccaacaatatgctgcagtgccgctgcaagtatgatgggcaccgggtctggctgcacaactgccacacaggtaactccgagccactgtggaatcagccatctataggctcagggagctggaacactgtaaatgtaccctctgctcccacactccagcgtgtgacttgtatgtgtgtggtgtgcaaaaggctatggatggaacagagatgcatttcctttgacatcttacaaggcagacttctagaactggtcagaccatcggcttcacccaataactacatcttctacatccctgtttrcacttaaggctgttwgattgtaaactcagtttccaatctgttctagaatctttcctgtcacctcaagccatgtcaggattttcaagtccattatttttcctttctctttcatatagaagttagggttagggtcctcacaggcaaaagtagtcctcttgctctgtgttgctgtctccagctgtgatcactgcttgcaagaaggggaccatggaaaacagagccacttacaggattggtagcatcagtcaaaggaagcatcatgatccagtgggggcagagaagaggggctgttctgtcagtaaagactccctctatcttcaagggttaaaaatgcccatatttgctatgggatatgcattcactcatacttgcatatgtgcggtgggatggggcagagttgttcattyagtcaacaaacatttactaaggctcactattgtgttgaacgctgtgccccagaaactgggaatgtaagtgtcagatagggtatgcacacatgcaaatagccccaatactactaatgtgtggactgaatgctgagcaagcacagacagaaagcaacctgttgggggctagcacaagcttcacagaagtagtatttgatctgaggtttgaaggaggagccaaagtcaaacatgggaggagtagagaaagagcacaggactgggctttggaaggcgtcacccgaatccagtcccaccactttctagctggaggacagtgaggaaatcacgacctgagtttyctgttttgtaaaatggggctgtatacttcaaacttactaagtactagagctttttgcagggagggttgtgatagttctaagataatggattttatcccgtgggcttctgggaactattgacaaatttcagtcaaggaggcaaaagatcatttaggttttcaaaaaataactgtggcaacagatggacgaaaatgagaagaggaagaacagtctaaggtttcgaatttgtgtggctgagtagattgtgctgccacttaaatgaaacagggatattgagaggaaccaggaactggaatccaaggctaygcacacggagacagcagatcctccataatgctggaatcaggctgcaagggttcccaggcagtgacaagggcaagaaaaataatgcagtcctgcaggtcctcttgccagtgtttaggatccaacagggctaaacagaagtgtgcggaaaacagaaggcacactcgggtgagagtctgagtttatttaattaaaggactatttataagaaaacaaggagtgttgagacatcaagcataaagaaagtagaaaaccgttatctgctttaggcttgaagaggggcaagggctgctttgcagccaggtgcaagccagagttgtgaaggagggtgaacctagctggaacaggagtcacagaccatcactgccagaaccacagggccaaagtaggggaaggaatatccggcctctctccttccaccctctgaccttctgctgttgctttccattgacccaactcaaacaaacaaaaaaagaggacaaaggagccagagtgatgtaatcgctaggcatcagcttcctagggcacagagggaaaaaagggcagagaatgaacctggggaggggggcaaaggagaataactagcacaactctttccaatcaatagcctgttcttcctgatgttcctgaaaccacacacctgtcccaggcctatttctataaaatgattggtgtctgtgcccatgccatgacttgatataaaggatgagctgggcagagtggatctatgtaagttgtcagggaagggatgagactggaraggttggctacttacctgttttcctttggcccacagggaattcatacccagccaatgcagaactctccctggagcaggaacagcgtctcaggaacaacctcatctgaagctgtcactgcacactcctagctgctgccgatacascagatacctcagcttattggagccatgcccttcacagagtcccaactcagaggaaaagggccagtgccaaggggcaccaagaacctgctcaggaagccttttgatggcaagatcaccaatccagatggtattgctccctcaggatggctctgggcctgcccctaagggcctgtggcctatggaatatgtcctccaggctttgctyagctgagctcctcttctgtaaggaaacccagtcatccctgaatcttgccacagagatccgggattcaggagctctcagtttcttagggatggactatggcccagtcccccatctaagtggtgctttgcaaatgtcttggaggagtataggacagaggaccaaaatacacagcaggtagtgttagctctctgctaggagctcaaagcaacacaacttgtatcaaaatcacaactggcagagaagctggtggatccaatcctttcttcatctgttgttatttagaactcacctctcacactctgttctttagtgtccttacctttatcttaccacacacatgggtgtttctattatccttggaagcacagacctcgggcatccccttattgcctgatgggccaacaccaacagttacggagtgcttgagaaggggcaagtttcacagaaatggccagatagggccttcctacagagcagcaagagtaggccaagcagaaagactgctgaggtaacacggaccccagcccctgtcagggcctctgccaaggaaataatatggaccatttacctggcaggcagtctgctctctctcaggatcaccacgcatctcaggattggtctaaacttcaagtctcaaccaagtgtctgaagtgaactttgcattgaataaatttttgccatggaaagaacatcaaacaagccactcatctctacagagataagaaaacaagtttggcagagcaagagacagaagaccgtggagaaatcagaagggggaacagtcagtttagttaaggatggaacctgggaaaggccaccattcctgcttgatggggctctgatttgctcttgctcaagtggaataaaaccccatggtcttcttgacatgattcttgatcttttctccactgagacacacttaagtgatgatccttacaggactgacaccctaatgccaataaaagttgctcattatggactgctacaaagaccagaccagctgtgattatgtacacaccccagaaccacagacctacccttttgcctcccatggagccagggcctgggatacacagggcacacatgcttctcatgactgcccatctacatttctccaatcagacataagtctgcttcccagtcagcctccccaggcttagagctgaaacacgggttagaaaggttaaggggtgaaggataggggcaagaaggtaaagtctgaggattgcaaacttttataatcaaggctgcgaagccaaaataaatggtagcagatggagcagatttacaacagcactacccccaccacatcacaagagccaccacatcacaagagctaccccctccttagggagtaaaaagggacatgttccggggaaccctctgtgaatacaaagaagtgctttcttccttatccccgaccttccctctcctcaactccctcatctccttcattaggcagagggagcattatattttggcatggcagtttaggtaaacaagggaaggactgatttcctgttggatccagcaaacatcccccaaacagtaacaacattatgctcacacatgcagctaatggtctgtgaaagaatgtgcagctagcaggggagcatgtggtgactgatgactagattcaagcagggaggttacccacagctgcttgctggatccagtttctaagagggaccaaaaaaacaggccaggcagccagccaccggctctggtctcagccttgctgcccacattacacgtttgataggtgcagccagttctaattcttggaaaaggccatacaagggttgtgctgttacaactctgagctgaaagggaaggacatgggaagactggtggctggcatgacttataactagatgaggaatgttaacagaataccaaccaccaaattccaggtagaaccaaaaatgtcaaaagactttcatctcagcatactttagcctcagagaaactaaggtgctaagaatgtcagcttagtcttcagaagcctaacttacctttatactacaaagactttcactctatgaagagcatatcataactaatgggaaatgtacttttctactaaattccaggtaatcctgagatttagatgttcaacacatatgcacagcagagtacattagctgtcttcctgaatatctaacaaaggcaccagtggcagctacagggtgctctccagctaactcagcttgagaaagcatggcttggatgtgcccaaggatttaattcccatctggaaaagctcaatatagtctgtgctgggccatagcaggagctcttacctccagctagcatacatcaatcccaactacttgaataatgtaactaaaaagcacattctctactaatggtagaagcagcaacactccataattttcaagtgtaggcttaaaaaaaaatcctttctctgggtctggttataaggataaatctggaaagttagaggtggctgactattggctgaaaaaaaggacaggctactagcatacagcattagaatgagaaccaaaataagttattgaaattacgaagattacaagaaaactgggaaataaacatggggctatatgttaccattaacaatgcctttaaaagctaaagtgtagccaggaagaagcatcctcacaggcaagtgacaggagtagtcatctcttttgtactgcccaaggtcactcttggccttgaagaatcaaagcagagcaaaggtataactcagaggtataccattcagtatgaagtcaggctgcaattccctgcatttcctttcaaatggagctgcactgttcagacctatcttagagaagtctgttccatgaagacagagagcactagtcttgttgctataggccaaagagaggggcacttggacaaagtactagtggagagggtcaagagaacaacttacttaatccctaaatttggcatggagtcactgaacatgaacaaaggacactagtagagccaaccacgaatgaggaaaacaatgctgaggaactgggagaaggttgtagtatctcaatagcagcagggatagttgggtaaggatcaagatccaaggccagggtcatttgagaaacatctgaatagaatcctactccaccatgttctaggtaatgctaataattcatcatcgtcatgggcactaaatcattaaaagatgaggccgttgccctagttgaaagcacaatgagccactatttcttgccacctcagcatcctaaggtctagtgctaccatttcttcagtgcagaactactttccaaaaacactgagaatgcagacatgagatggataaagcctgagttgatggctttgacttgtccacatcctttaggaaatctctcactgcccagaggtgtttattttatcctggctgcttgtcattgtaacggatggtctggtgctgcttgccaagtacytctggcataggttgagaagatcataccaagaacacgctggtgtgccacatgtcttcttcagggtatcagatttgcagagatagcagaaagcaagaaaaaggttggaatgagggtgtacaaggaagatatgaaggggagaggagctaccacatagcagtcccaggataatcacttttgtagtatactgaggcagagatatgatcaattctctactcactgggattcaataaaaacaacagatccatttaacttatgcacagccttataggcatgaggataagaagaaagctgctctcctatttctttgttggaatgacaaaaaccaacaaacaccacagtgatatatgtcataaaatgggctttaatgttccctcttacaacatggtattactgcttacactggaactggcacacagctcccaaggttggtttactctgaggaatgaagctggtatcccccctggctgcagtgcagctggagcggtcccaggcactgagctcagtataaactttggagtctaaatacccacatctcctgtagttcaccaactttgcagttctggaaccggcagtgcagattctgtgtatgccaagtaaaccagacactgttctgcctctttgtactaactgctctccaaccaccccctactctgcctccagtattactctgctttgtgagatactaaggaatggtctgcctctgcagggcctaaatctcccatacttgcggtttgaatcctctgttctgttttgtatttgctttaaatatcttggaagtgtgacccacgctaacatgacttgccctgtccaggcaactcttggaattcacatctcccacgtttcttcctagctgatggctccctactacgcccaccacagtagggtgattccaaagaactgcatttaggagtgaagacaggagtctgtcttccttctatacccagtcagtccttgtctcgatcactttatctctttaacatgcacatctgcatgtacatagagctctggaaggatcatcttatctgaaggctatggaaacattttctgattcatggaattatccctttcattgagtgatgttcaaactgtagactggtctctgccttcccagatgtcttcccgttgcttggcttccaaccgctttctctctgtaaataagagcagtattaaccacagttgtctacttcatataaccaatgactttcccttagtccaaattacaaggcaaactttagtcatgagacaagtggatatcctggtctctcttacctgataacaagagttaattcctttaatttcctaagtgctttgtaagtgaaaatgatactactgtaagtcattacatttactactatataataaaaaatatctgaggctaatagaagtatatggaataagtcagaatctagtagggactcagattctagtcttgctaatacatatttaaattctacttttcaactatgtttagtgcttcaacacaattgcccattattctcagcttactgatctttacaaatatttcaataagtatcaaggatatgtattgatattcttctattttgttgcttaaatggaaatggtagcccctgggctttactcatatctcctctctaaaactttattgaaaaaatatttcagaggcaaaccacatttcaatattttcagagcacttccaggagccagaaatcttctggaatatacaattacaatatggaaaactaaaactatttctaaaaacaaaaaatatacaaatctggataattcatcttcaatttttaatatagaagcttggttctccataacactttcaccaaggtctgagaaaatatggaccatacaacagtctggtgacccaagcgctcctttaggtgccacaataccagttccaattgcatggctagtcatttatcttgacaccataaaatggggataagcctacatcatagatggtaagcctaaatgcttccttcttactgttccaaattgataatgcctgtataaggtttagcaagtcatgaaccagggagattacagaaatcgagatgaattcagaataaacacttgctattctgatatatctttcctcatcagcagaatcccttacaacattcctatactgtatttgactgtactttaagggcaaagaagttagttatgaagctgactggcacttggaaatgtgagaaaaagaaattcactgctatttgggcaccatcttgtggcattatctgaatatagcagcaaagttacaagaggcaaaaaacagtggtctgcaaattgcaaaatgaaggctggtagagaatgccctggaactgaggcaggccttgaactgcactggggttctctaggagacagcacaaaggataactggtttgtctaatggattccagaatttcttaggaaggcagcatggtcttgattcttacaaacatggagaagttaggaggagatctaaaggcaatggatgaaagcaatcaaaatctggttctacatcccaaggaaaaatgaagaaaccagaaaagtaaattattagaactccaatttttcaataaggtgtgaaacttaaatctttaagagtaatatgagaagagatccgagagcagtagaaaaatataacaggcccataacacacaattccaaaatcaaaacaattctgaaaacaaagttattgctttctttaaagcttggggccaaaattaatcgatggaggcaaatctaacttgaaaggatacgaagctatttatagtctttacatatcccatttagtgtgaacagtcacacactctgctgcagaaatattaatgtgtctgattttggcgttataagacagataccatattacctttctaaaatctggaaagttcagaattctgaacctttttttttggagatggagtctcgctctgtcacccagggtggagtgcagtggtgtgatcttggcttactgcaacctccgcctcccaggttcaagcaattctcatgcctcagtctcctgagtagctcttgagtaacaggcacatgccaccatgcctggctaatttttttgtatatgtagtagagacagagtttcgccatgctagccagaatggtcttgaactcctgagctcaggtaatctgcccacctcggcctcccaaagtgctgggatgacaggcgtgagccactgtgcccggcctgaaacatttcctaacactttctaataaaagtaaatagattctaatggtaagccatatgaaaaaactagtaagagtaggaagacaaattgagaagcacaaagaaatagtgaaaatgtgaggtgtaaatttagaaatacaagaacatgaatagaatagagaaatgtaggtcaggataggaaataataatttctttattttaaagatgaggaaacagaagctcagagagctgaaatgacttgcctaaggttacacagccagtgaaagaactgaatctgggacccagatccttaattcttcaccagcacactttctactatcctgacatctgaaaatatctacaagggaaaaaaatatgaaaaaaattgtataaacagaaagacaaaga

SEQ ID NO: 95254 - DNA, 31615 bp, Homo sapiens
ggggggtttgttttttgggtttgttttttttttttttttgagacagagtgatcagtctccaaaaaaaaaacgacagaggtcaagtgatctgcccacctcgacctcccaaagtgctgggattacaggtgtgagccactgcgcttggcctggaagtaggtttttaaaggaaaagaggcagttcctaacttgtttaccaagaatttacattaaaataacaagttatagattggctatacattgtactttgtatcccaaattcgtatctcagttgacctaacatacttccaatgtagatgtaacaatgtcaggttacacttcaagttcgcaggaacttgaaggtaatgggtgaagtagccagtcaggataaaatgtcttaacaattgcctccaggttttcctaggaagccctgaagatttctttttaaaatattattattatttttttagagttaggttatctctatgttgcctgggctggtcttgaactcctggcctcaggcgatcctcctccctcagtctcccagagtgctgggggattacaggtgtgaaccacccacagtgcagccaaaaaataaaaaatttttaaaagaaaaaaacccgccaggcacagtggctcacgcctgtaatcccagcactttgggaggctgaggcaggcggatcacctgaggtcgggagttcaagaccagcctgaccaacatgaagaaaccctgtctctactaaaaatacaaaattagccgggcatggtggcacatgcctataatctcagctactcgggaagctgaggcaggagaatcgcttgaacccaggaggcagaggttgcagtgagaaactctgtcaagaaagaaagaaaaagagagaaagagaaagaaagaaagggagagggagaggggcaggaagaaataaagaaaagaaagggaaggaaagaaaggaaagaaagaaagaaagaaaccattgccccagagtgtgggtgtggaaggcatgactgaagtcccatactcatgtctttgagccaatagactgtgcatacatcacacagagctcagactgctctaagctatctttccttctcaaccttataggaattcaaggccagcctgggcaacatagcaagactccatctattttttaaaaattaatttttttaaggagttcctaggaaaacccaggggcaattgttaagacattttattcctgactcgctgcctcacccattatcttcaagttcctgtgaagatacaaacttgtgatacaaagaataatacatagccaattaatatcttacactgtgcctggcccagctgctcaatgcttatttgttaattgaagaaaaatatggtcccatgagcctaagaagttcttaccacgaggtaagagtccattgcttttactcacactgttaaatctcagtgtctagacacagtaggtgctcagtacattattattcatgagaaagggaaggaagatagagtccctgccctcaagctgaaggcatgtggctttctgaggcagtaggagaaaaaaaagcaaaatgagctcaaaactccgtaacagttcaccaattaactgaggcaggctgcaggctcagcaaaggctttattttttttctaattttttttttcaaccagaatgctcaaggatcaagcaaaggctttaagtgggtcatgtgctatgagctgagtcttaaagaaagagtaattagattgctggaaaaaaaggagacaggaaaaaaatgttacaccaagcaggagttacctgagtaaaagaggaaggctagggcatatagggaacagagagcaaccttcttgattcgaggggaagcagagttaaactgggttaccaagggcctggaaagtagaacagaacgagaccagcctgggcaacatggtgaaaccccgtctctactaaaaatacaaaaattagccgggcttggtggcacatgcctgtaatcccagctacttgggaggctgaggcaggagaattgcttgaacctgggagaaggaggttgcagtgagcagagattgtgccactgcactccagcctggaacaacaagagcgaaactccatctgaaaaaataataataataataaattcatggaatactgtttcagttaaaatttatacaaacaagccaggtacgatggctcacgcctataatcctagcactctgggaggctgaggcgggtggatcacctgaggtcaggagttcaagaccagcctggccaacatggcgaaaccctgtctctactaaaaatacaaaaaaaaaaaaaaaattagctgggcttggtggcacacgcctatgatcccagctatttgggaggctgaggtgtgagaatcgcttgaacctgggaggtggaggttgcagtgagctgagatcgtacccctgcactccagcctaggcgacagaacaagaatccgtctcaaaaaaaaatgtatgcaaacactaccttcaaaagtgtagaatgtacatccaggcttggtggctcacacctgtaatcctaggggagaccaaggcgggtggatcacaaggtcaggagtttgagaccagcctgtccaacatggtgaaacctcgtctctactacaaaaaattagccaggcatggtggcaggcgcctgtaatcccaggtactacggaggctggggcaggcgagtcgcttgaacctgggaggtggaggttgcagtgagctgagatcgtgccattgcactccagcctaggcaacagggccagactccgtttcaaaaaaaaagtgtaaaatgtaatggttggaagcatgggcttggaaatcagagacatttgagtttgaatccagtctccatgatgatcagttgttttagacaagttatataacctctctaagcctcagttccttaatctataaaatgggaataatcatccccatgattactgaatcaagaatcaatataatgttatgtaaagcacttagcatatgaagcatgactctctaataggaaaaataaaaataaagcacttagcatagtgttttgtacataaagagcactcaacatatggtagctttttgaaaaaaaatcactgctgatgttactgttgatgttgtttttgtttttatgcttaaagtcaccagcagactagaggtatgggctttcacgaatcatggccagtcacatagtcaccaatatttcataatcattctttcttgaatcaaattattgccactgctaactagaaataccaaattgaaagcactattgtttaattatatgtatgggaatgtcttaaacatttttggccagacaaaccattctaaacaaaagtcgtacagaaggttaaattgcccctttcagttataatacatgcacttccttttcctatctagacctcaataatcaactgatgcctggctcttgtggcccagggtctgtagccacatagataatcttttggtatcattcatctcatttagcccataagcttcaaattatggtaaaggaaaggtcccagatttagagttctccctggaattctgagttttttctccacagaaacccctcagagtcttttattttatctaaaaaaattttttggccaggcacagtggctcacgcctgtaatcccagcactttgggaggccgaagcgggtggatcacgaggtcaggagttcgagaccagcctggtcaagatggtgaaaccctgtctctactaaaaatacaaaaattagccggctctgtcactcaggctggagtgcagttgtgcaatctcagctcaccgcaacctccgcctcccgggttcaagcgattctcctgcctcagcctcctgagtagctgggactacaggcgcgggccaccacatccggctaatttttgtatttttcagtagagacggggtttcaccatgttggccaggatggtctcgatctgttgacctcatgatccgcccacctcggcctcccaaagtgctgggattacaggcatgagccaccacacccggcctagacattgttttaaatgcattacatggattaactcatggaaccagctttatagtatcctgtgatgttggaaacccagacccagggaggtaaaggtaatgtgcccatggtcattcagctggtaaatggcagagccggatccaaatccaggcagactgtttccatgctcttaacactatgttgattcttattaaatatccctatgaaatatgtctcatatttaccccctttctttcatctccactgatgctacatgaaacttccaggatgtgttagttgcattattacaataacttctgagtttgttactttgcttccaatctctcactggtcatctctgagtgtcactgtcagattaattttcataaaatactgcttgtagtgtgtcattcccctggccaagaaactacattttatttatttatttatttatttatttatttatttatttatttatgttttgagacagggtctctgttaaccaggctcaagcagttctcttgccttaacctcccgagtgctggcaccacaggcacttgtcaccacactcagctaattataaaggccataagagtaacaatcatggcttttcaagcctgacagaacctagcatcatgctgtactcacattgtttaagaaataaacatatggatacacagattgatgtgagtggtatttgggaagatttgctccaatcttggcactatattttatttatttatttatttatctagtgaaccagaaataaaattataagccccccaatcaaatgaatggcctcctcttctgggccaagggcattcctaaattaacctgaaaaactatttgaggccatgatgagaagtgggagtcagacatgcctcattattttctcctgcttttggaattcaggaccagcatttaacattaaagcagagatcttaaggttgacacagcagactctttgtagcaatgataccaacattgacagatagcaggccccatctgtcatgatagcaggcaaaggtgtcttttgtggtgaaaatctacattctgtagaaaatccccttccctttccaggtctttttcctgatccaggggagaactaactaagagtctgatacctttctaaatctgataataaacactggccagccttggtggctcacacgtgtaatcctagcactttgggaggcagagatgggaggatcacttgagcccaggagttcaataccagcctgggcaacatgacaaaacaccatctctacaaaaaatacaaaaataagccaggcatagtggaatgaaccagtagtctcagctacttaggaggctgaggtgggaggataacttgagcctgggaggtcaaggctgcagtaagccgtgatccagctactgcactccagactgggtgacagagggagaccctgtctcaaaacaaaaaaaaaaataaagaaacatttacaatctatgctctctggagcctgctacctgtagccttctctgcataataaaaaccttgatttccacaattccttgtgtgtgtgtgtgtgtgtgtgtgtgtgtgtgtgtgcgtgcatatcttagtaacaattccttaacttaacccagacattcccttctgtgggttccaggtctttaaactctttcaaccaattgtcaatcaggacatctttgaatccacctacatcctggaacttgccacccccacccccactttcgggaccaagccaatgtatattttacatgtattgattgatgtcttacgtctccctaaaatgtataaaatcaagtggtgtcccgactattttggacacacattcttaggaccttctaaggctgtgtcacgggcatgtccttaacattggcaaaataaactcctaaattgattgagacctgtctcagatactttttggtttgcaatttatttatttgagacagggtcttgctaggtcgcccaggctggggtacagtggcagaatcatggcttattgcagcctcaacctcctgggctcaagggatcctcccacctcagcctcctgagtagctgtgactacaggcacccaccactaggctgggtaatttttttcttctgtagatacggagtctccctgcgttgcccaggctgatctagaactcttgggctcaagcctcccgcactcctgagctcaagccgcggcctcccgaagtgctgggattacagatgtgagccactgcgcctggccaggtactatattttaaacaaaaaggatctagataatgacaaggacagcacaaattcctataatgaatgcaaaagtgtcttgatatcacaatgtctagcacagagttattggaggctatcctgcctagcgcgttacaatttacaaagctgcctctctgaagctsgatttaggatctgccttaaactccgcggcggggcccttgacagcagtggggactggagcaagatcagagccgctcgcgttgatggtcactgttgcttcgggcgcaggtttggttttctttggggttgccatttcaactagacggcctctgggtaggccagatctggatcctctgtctttatctgcgttgcagaggtgggaccacccctctttcacatagtcagcccrggttcgcaaacactcggcccmgcacaaagatggcgtggagccgggctgggccaatgcggagtggcgttgctcccggttgcctaggtaacagccaatgggcagcgggaattgtacccagtgcggtcgcccaggatggcggygtcaagtggggcaatcgctggtggargtggcggagagcaaggtggcagccgggagcccatcagaggaaaagtccgaggcgctggaaccctgcgtccaggcgtgacggtcatcccgaaaggccggccccaggttggctggaggcgcaggagggagggggccgggaaagagtgtgatcggtcaggtgggcactgaggaacggagcacgagatgacccggctcgggggcgcggctccacctcggatacgctgacctgagggcggttgcctgtgggggacccaaacctgaaccctttagtctccaccgcgggggtcgaggcccgggagagctgactggactggggttagcgagcagagggtggagggttgcatcaggggaattggcagacctgtgtgagcgttagaccctgccgggcgggagagcgggcccggatagcaggaaggaacgcgcctggaaggtgaaaatggggtgcgagaaggtgttgccttgttgtggtctagggctttgttttccctgagcccgcctttatctcactggtggagagaactcccacatatggaagcctggggaatgggatgcttcatttagttgatgggtggtatccctgcattctagcatctctgaactgcttaggtaccagcaggaataactgctatatcggagtccagccctggcattccctttcccgtgaaataggatagtattctggcagtattactccctagtcccaatcacccccaggtcatcatcgcctttaaataaaaaaaaaaaaaaatctttttggcgccagtattttcttcccactttcttcaatctaaccatcccacagtcttccctaaacgaacccttcatatagcaacgatacatttctttacttttcacatgaggaaagaggaggttagacttataatgaaaaacagttatttcgagctccttttaaaacacttaaaaaaaaatatttaggccgggcgcggtggctcacgcctgtaatcccaacactttgggaggccgaggcgggtggatcacgaagtcaggagttcaaaactagcttggccaagatggtgaaacctcgtctctactaaaaatacaaaaattagccaagcatggtggcacgtgcctgtaatcccaactacccaggaggctgaggcaggagaattgcttgaacctgggaggcggcggttgcagtgagccaagatcctgccactgcactccagcatgggggacagagcaagactccgtctcaaaaaaaaaaaaaaaaaaaaaaaaggggagtattatttgactttttgttctaggttcctaacaaggctaatctttgttcatcaaagccttcattttcttctctttaggattctaaaagcttatgaactgctttctttattactgaaataatttgacaagactattgtaccctgggaagggtggttctggggggacatgtgggtagttagggtggctgcctccacccagtattctctaactggatctcccccaccgccccaaccttttgttttgttttgcttttcttttcttttttttgagacaaggtctggctctgttgcccaggctggagtacaggtgtggtgcagtcactgctcaccccggcagcctcaaattgtgggctcaagcaatcctcctacctcagcctcctgagtagctgggactacaggcatgcaccaccacacccagcaaatttttgtattgttttgtagagatgaggtctcactacgtttcccagcttggtattgaactcctgggctcaagcgatcctcttgcttcagcctcccaacgtgctgggattacaggagtgagccatcatgcctggccctttttcctctttatgtcagtttttttttttttaatcctcttaaattggacacagtttactgtgaatacaaaaatgttgtttaatacgttgatttcttaaaattagaaaacgataaaaagaacggaaacaaaaattctcgttattgcctcagagttctgtttggaaataagaaaataataataattaaaaagaaatgtctgggacaaaagaaaatgaagataccaggaatatggtatatagtgcagactaatagtgtgttggtttacagggacagaatagtaattttcttttatgtaaatgtttggactgatcctttgcaacccatctatcaggagtgcagaaagggtgagtgtctgtttagaagtgtgaatcatcttggtttgtgactggattccatgggtgtatctgtagcctaaactcctgagccatatattctctttaaaaatatgatttggataactgatagaaatactgatttgcatcccttattaaagtattgggccagacatggtggctcccacctgtaatcctagcactttggaaggctgaagcaggcagatcacttgatcccaggagttcaagaccagcatgggcaacgtggtaaaaccctgtctctaccaaaaaatgcaaaaattagctgggtgtcgtggcatgctcctgtagtcccagctactcaggaggctaaggtgggaggatggcttgggcccaggaggcagaggttgcagtggctgagatgacgccactgcactccagcttggatgacagagccagactgcctcaaaaaaaaaaaagtattgggctttcagtcttcatcggcactgactatactttgttaaactaggtttgtctcaatgaccatggttactggtgaaattcctttttaggtcagtagctgtaaagctattcattagcatggttaattataaaagtcataaaatccagacactgtcccaaatagtgacaatatcaactatttgggcacatgtgacagtttctagccaaatgtattcaaccatggcctgagactcatggattctacacacattccctttcattagcacttctgactgtggtcttggcaatggacatcattttggcaagcatttgctgaagggaatttgctatatgtgcctaagtcaaaatggaatggaagtttgtagtatgtactgttgaaaaccaatgggagaggatggtgggagggttaggttgaaacatggtattccagttattattgctgtataacaaagtaccccagaatttagcagcttaaaacacccatactgtggccaggcgcggtggctcatgcctgtaatcccagcactttgggaggttgaggagggcggatcatgagatcaggagatcaagaccatcctggctaacacagtgaaacctcatctctactaaaaatacaaaaaattagccggggccgggcacagtggctcatgcctgtaatcccagcacttcgggaggctgaggcaggcggatcacaaggtcaggagatcgagaccatcctggctaacatggtgaaaccccgtctccactaaaaatacaaaaaaaaattagctgggcatggtggcgggcgcctgtagtcccagctactggggaggctgaggcaggagaatggcgagaacctgggaggcagagcttgcagtaagctgagatcgtgccactgaactccagcctgggagacagcaagactccgtctcaaaaaaaaaaaaaaaaaaattagctgggcgtggtggcgagcacctgtagtcccagctactcaggaagctaaggcaggagaattgcttgaacccgggaggcggagcttgcagtgagccgagatcacaccactgtactccacccagcgtgacaaagcgagactctgtctcaaaaaacaaaacaaacaaacaaaaaaaaaacacccatatgatgctcatggattctgtgggtgagggaatttggacctggcaccatggggaggcctctctctgctccctgatatgggatggaatgcaggctcaatggctgagggctggaatcatctgaaggctccttcactgatgcctggtacgtgggataggatgattcaaaggtaagggcagccaactggaacaccaatatatggcttttctgtgtggcttggctttcagtgttagcctctgtgtagtcaggctttttatgtggtggctcgggtctccaagtgtgagtgtatcagtgacaagatggaagttgcatcaccttttatgatctaacctcagaacacaccaccattttcttttgagacagagtttcactcttgttgcccaggctggagtgcaatggcgcgatcttggctcacttcaacctccgcctcctgggttaagcaattctcctgcctcagcctcccaagtagctgggattacaggcatgggccaccacacccagctaattttgtatttttagtagagatggggtttctccatgttggtcaggctggtcttgaacttccgacctcaggtgatccgtccgcctcggcctcccaaaatgctaggattacaggcatgagccaccacgcccggcccacaccatcattttcattgtgttcttttggtccaagcagtcacaagcctactcagattcaagggaggggaggtagatttcaccttttaatggatcaatggccagatcaaattgtagacaaacatgtaagacagaagatactgttgcaaacatcttggaaatacagtccgccacatttggtaataagaaggtaaccttttcagtttcattggcttccttaaaatatttagggtataatccccaagagctaacagcatactaaaaaagtggttaggggctgggcgtggtggctcatgcctataatcccagcactttgggagtccaaggcaggcagatcacatgaggccagaagtttgagaccagcctggccaacatagtgaaaccccatctctactaaaaatatgaaaattagctggccgtgctggcacgcctgtaatcccagctactcaggaggctgaggcacgagaatctcttgagcctgggaggcggaggttgcagtgagccaagatcatgccattagacttcagcctgtgtgacacagtgagactgtgtctcaaaaaaaaaaaaagaaagaaaaaaagtggttaggtgtaccacttgaaaactagtactttgtccgtaaataaccctcaaactggagaaatgttcccttctttcagcaatcttatactgttccttctggaacaaggtagaatgccactctttkgaagtttcacgtagccttgagaaaaagtaaataaatacaaggcagtactttccctgagtccctgtgtagtcaatatgactcctcaaatcccactgcaataactccttccaaattttgagtgaaaacaagttggttaactgctgccagacatctaaaggaaatgctcttataatctttttgtataaatagtgattttgtgtttaggttttggaatggttgtttaattataagatttagtggaagatacagcccttcagattctaactgatgtgttttgaaggaatgaaacttcaaccataagctgacttttagtgctgtaacttagttctgggaagagctgaggattgcctgatcaaaatgcccgtctgtactggaaagcgttttcttctgctattctgatggaaaactacttctcatgctctcattaatgttatatttgcaatggagtcatgttggcctctaccccagcacactctgatgctgggctggtgataagaggcttgtgagcctgaaattggatgctgaccttgtgggacattgataggacagagatgacatggcaagtaccagcatcacgtctcagaaaatagctcccagaggtttggagggagtttactacaagaagataatggtccttgcctcggatatcttctgtgtgagagatactggaaatggaatgcttgactgataactgaagaagggagaaagtcctatgggagtggcccccaaatatctctagaagagtctccacaaggttgcccttcatttaggcgagaaatgaatcttttctcttatttgggtgagagcacagggattcttataactcgtctgtcctcatggctgggacagagccagggcgtagaagatgtcattgaaccctgctctggtcaggcctagctgttttcacattagaccatttctgggcttttggtgtctgtatcaaaaatcattatgttctggctgggcgcggtagctcacgcctgtaatctagcactttgggaggccgaggtgggcagatcacatgaggccaggagttcaagaccagcctggccaacatggtgaaaccctgtctctgctaaaaatacaaaaagtagctaggcgtggtggcacacacctgtaatgccagctactcaggaggctgaagcacgagaattgcttgaacccaggagacgaaggttgcagtgagctgagatcgagccactgcacttccacctgggtgacagagtgagagtgtctcaaaaaacaaaaaacaaaaaaaaaaaggtgttcaggtccctctgctgaagctactcagcaaagtcaccagcaccagtctccattaaacaaacaaacaaacaaaaatcaggccgggcacagtgactcatgcctgtaatcccagcactttgggaggccaaggcgggaggatcacctgaggtcaggagttcaagaccagcctggccaacatggtaaaaccctgtctctactgaaaatacaaaattagctgggcgtggtggcaggggcctgtaatcccagctacttgggaggctggggcaagagaatcgcttgaacctgggaggcagaggttacagtgagctgagactgcaccattgcactccagcctgggccacaggaatgaaactctgtctaaaaaaaaaaaaaaaaaaaaaatctgggcacagtggctcatgcctgtaatcccagcactttggaaggctgagatgggtggctcacctgaggtcaggagttcgagaccagcctgaccaacatggtgaagccctgtctctactaaaaatacaaaaattagccagccatggtgacggtcacctgaaatcccagctattcgagaggctgaggcaggagaattacttgaactcgggaggtggaggttgcagtgagccgacattgcaccactgcactccagtctgggccacagagcaagactccgtttcaagaaaaaaaaaaaaagagagagaacaagcatcagaacatattatgattatgattatgattatgattatgattattattattattatttttgagtcagagtctcgctctgtcacccaggctggagaccagtggcatgatcttggctcactgcaacctccacctcccagattcaagtgattctcctgtctcagcctctcaagtagctgggactacaggcatgtgccaccacgcctggctaatttttgtgtttttagtaaagacagggcttcaccatgttggccaggctggtctcgaactcctgacctcaggtgatccatcttagcctcccaaagtgctgggattacaggcgtgagccactgtgcccagcccgcttgttctctttaaaaaaaaaaaaaaaaaaggcatgaggctgggtgtggtggctcatgcttataatcctagcactttcggaggccaaggccagagattgcttgaggctaggagtttgagattagcctgggcaacatagtgggacacggtctctacaaaaaagttagttgggcatggtggtgtgtgcctatagtcctagctacttgggaggctggggcagaagggttgcttgagcccacaagttcagggttgcagtgagttatgatcaagcgattgcacaccagcatgggcaacagagcgacacactgtctccttaaaaaacaaaaaatcgttatgacatgaggccaaaataaaaatatcctgtaggatgttgataaagagtggatgggtggcaactatagtttgtttttcctctacttagtattcagctctttagtcaaaattgctgagattttctttttcaaagtgttgtttgaattacattggtagcagtttttactgaggaaagacctagagaagttttcattacagtaagtatatgtgtgagtttaagtgtaaaactttgaaagaggaaagaaactaacatttagtggacaggccctagcagtgttctaggtacttacgtgtgtgtcattttctttcttttatttttcttttctgtcacccactgactctcagatatttaatttaatccacctgccaactatgtgaaatacatatcttatctccactttacagatgaggagactgagatttagagatacttaaataccttgcccataattatacagtgaactcagatttgaactcaagtcctcctgtgctcagagtctacaacaccaccatattatcctgggaggccagataggatagtatggtataagttagcaagttactgtaagaacttgtgccagcaaggccagctgtcagagctctgattctaactttcacgtgttagtttccacatgtatgaccttagttaatttacttatcctctctgcaccttagtttcctcatccctaaagtggaaataataataatacccaccccaaaaagttgttgtgagatgaaattagataatatattttaaaaacactgatgctcatgccgtgtgcggtgactcacgcctgtattcttagcactttgggaggccgcggcaggtggatcacctgaggtcaggatcacctgaggtcacctgaccaacatggtgaaaccccatctctactgaaaatacaaaattagccaggcgtggtggcgcatgcctgtaatcccagctacttgggaggctgargcggaggttggagtgagcaaagatcgcgccattgcactccagcctggggaagaataacagtgaaactccgtctcaaaaacaaaacaaaacaaaaaacactgatgctcacaccagtaatcccagctacttgggaagctgatgaggaagaatcacttgaggccaggagttcgggaccagtctaggcaccatagcgatacccatctcaacaaaaaatttgaaaagtagctgggtgtgttggcacacacctctagtcccagctactggagaggatgaagcgggaggatcactttagcccagaagtttgagactgcagtgagctctaatcacaatcacactactgcattccaggctgggtaactgagtgagaccccatctcttaaaacaaaacaaataaacaacactgatggaacacagtaagaggtcagtaaatgttagcttctgttataaaggtatttcagacagcttctctggggttagtgcaattgattattagagagggttgtgccacctgaattgaaatataaataatctagcactgtccaccatgacaatgtggagaaagcaaatttaacatatgggttgttttagttgaacatttaaagcatcacttttgcataaaatataccagaccccttttgtgctatgaaactatggaacccactctttggaactccatcttgactggatgaggttttggcttccctgggacttgaaggaaaaggaagctagctgttggcgccaggcccccgagatttaagaatcccatcttgcggccaggcacggtggctcatgcctgtaatcccagcactttgggaggccaaggcgggcggatcacgaggtcaggagattgagaccatcctggctaacacggtgaaactccatctctactaaaaaatacaaaaagttagtggggcgtsgtggtgggcacctgtagtcccagctactcgggaggctgaggcaggagaatggcatgaacccgggaggcagagcttgcagtcagccgagatcatgccactgcactccagcctgggcaacagagtgagactctgtctcaaaaaaagaaaaaaaaaaaaaaagaatcccgtcttgttttgagctgggagcagtggcatgcacctgtagttccagctactcagaagtctaagaggggattggaggatctcttgaacctaggagttcaagtccagcctgggtaacataatgagaccctgtctctaaaagaaaaaagaattctttcctgtttctccaccaggtctggccccagtactctgaggagaatgtgtccttgtcctgttggaactcagtcagatgcctgagggtcagactctaggttacttattaatcagaggggactttttttttggagggggacagggtctcgctctgtcacccaggctgtagtggcactgtcatgacttactgcagcctcagactcctgggctcaagcaattgtccctgctcagcctcccaaagtgctggaattacaggcatgagccaccatgcttggttgatagaggacttttcaatagtgatttatagttcagagaacttttcacacacagtatttccatttattgtagcagtaggccacaagctttgaagtaaggatctaatgatgtgcttattaaaactgcaggttcccaggctctgactacagaatctgattcagtaagtctgagtttgggcctaggaatctgcattrtcaaaattactggagaaaacattgtattgcttagatctggaaaagatgaggaggtagctagatgtggtagtgtgcgcctgtagtcccagctactcaggagactgaggtgacgggatgccttgaatccaggagtttgaggttacagtgagctatgatcgtgccaccgtgctctagcctgggtgacagagcaagaccctgtctctaaaaaataaataaataaataaataaataaataaataaataaatgaaagatgaagggatgaatgaagagacctagggaattaaaaaagaaatagggcttgtattttttagtctatcaaatgacgtactatttgcctctgtttatatttaatgattttggggggtatcttaattccctcttcttcttcttccgtttttttttttttttttgagacagggtctccctctgtcgcccaggctggagtgtcgtggcgtgatcttggctcactgcacttctgcctcctgggttcaagcgatccttccacctcagcctcccaagtagctgggactacaggaacgcaccaccacacccggctaatttttggattttttgtaattttggtacagatggggtttcaccatrttgcccaggctggtctcaaactcctgagctcaagtggtccgcaagcctcagcctcccaaagtgctgggattgtaggtttgagccaccgtgcagttcccttcttatagaatatccttcaatacatcctttcaccactaatgtgaagccatatctagccagtccccaaatgttactgattgttttcctatgatgtatccccccagttgttccttctgctcccattatactgtgatctcccagactcatgcctgaacgtatcagttagctttttctgggtaataacacaccaccagaaaacacagtggcttgaaacaataaccatttatttatcctgtgagtctgtggtcgctagtttggggccgggctcagaagggcagttcttctagtcttgcctgagcaatttgttcatctgtggccagctgggacagggtctcaccatccagtagactagattggactcatttacatgggggcagaacaggtccaagtgtagcaagagggcaagcccagtgcacaggtgctttgcagacctctgctagatcacctttgcgaacattccattatctagaacaagtcacacagccaacccaggtccagcaggtggaggaataaataaactctgcctctttttttttttagacagagcctcactctgtcgcccaggctggaatgcagtggtgcgatcttggcttactgcaacctctgcctcccgagttcaagcagttcttctgcatcagtctcccgagtagctgggattacaggcacccgccaccacgccctgctaatgttttgtatctttagtagagacaggatttctccatgctggccattctggttcaggtgatccacccactccgcctcccagagtgctgggattacaggcgtgagccaccgcacccggccaactctgcctcttaatgggaggatctgccttgtcacattgtagggtcatgaacggagggagaataactctgcccatttttacaatttgcttcattatcatatttcccttccttgcaagcttttctgactatggacttgctgctccaattcatcccacttcgtgctaccacattcattttccttacacactgccttcatattacatcctggttcacaaacccgcagaggtcgcctcttttcctccctcatatgctgtaaactcttatgcccagctttcaaaggtctctttaagttagcctgagctaaaagcagaggctgtgctgtacaggaaaaaaggactagcatagtcaggggaggctgtcaacaaactttattacctctctgggcttctatttctcctataaaatgagaggttgggctaaatccatgagattcttttcagatttatttatttatttatttatttatttatttctcgagacagagtcttgctctgtcacccaggctggagtgcagtggtgtgatctcagctcactgcaacctctgcctcctgggttcaagcaattctcctgcctcagcctcctgagtagctgggattacaggtgcccgccaccacacccggctaatttttgtatttttagtagagatggggttttaccatgttggccaagctggtctcgaactcctgacctcgtgatccrcccacctcggcctcacaaagttctgggattacaggcatgagctaccacgcccggcctattttttgttttttaattttacatttttgacatgaggtcttgctatgttgcccaggctggtcttgaactcctgggctcaagtgatcctcccacctcggcctcccaaagtgctgggattacaggtgtgagtcactgcaccaggcctctcttcaaatttaagattgtggctacatgtacctacacaggcttatttcctaatactccccaaataaaccctcaactgtaatgagaccaggcttcttattttgccatggaacatctcgtgttcacattgcccttagagtgttccttgccctttgagtgttggttccccatattttcttttttttttctttttttttttttttttttgagacagagtcttgctccgtcacccaggctggagtaacagtggtgtgatctcagctcactacaacctccgcctcccgggtttaagtgattctcccgcctcagcctcccaagtagctaggattacaggctcctgccaccacgcccagctaatttttgtatttttagtagagacggggtctcaccatgttggccaggctggtctcaaacaactgacctcaggtcatcccacccacctcggcctcccaaagtgttgggattacaggcgtgagccactgcccctggcctgttccctatgttttctgattctggaattgctctttgccttctccactgcttgtctgcttgttttaaattctggccatctcatgtctttgttaatctctgccatccaagttggcacttaatcacattatctctggcataattcagtgtttaaattgttagtcttattaactagattataaactcgtcaagggaagatactgtattttatacatcgactgagcacatagtaggtatcaaataaatatttgtagattaatatttgtagatttccatcccaggtcatagaaaataggaactggctgaaaacttttaagataagcaggaggataagagcacttgggcagaggtggagatgatggtgctggtggtggttggagataggggtattttggttaaatgcacctaaggcagtgtacacttaccaggctggtggcctttagaatgtatctataaaattgccttgcagtcctttcctcccgccattccatgacactggttctcctttgcttatttcctacagtttcatccttttatcctgtaatctgtcaccatgaccctgacaaaagkttccttcacctactccagtggggaggaatatcgtggcgagtggaaggagggtgagaaggacccctggggagtatccatgatgaacacttcatttgctggaggacaaatacatcaggatatatagccaactttatggatcttcmttttcaactccaggatttaattccatatagtgcctgccattcctttattccattttaggattaaataaaggaatttgaaaatgctattgttaattcaacctccaggaatgagttatatctttcttttttttgcttctgtttttgttttgttttgttttgttttttgagatgaggtctcgctcactatgttgcctaggctggagtgcagtggtgcaatctcagctcactgcaacctctgccccctgggttcaagcgattctcgtgcctcagcctcccaagtagctgggattacaggcgcctgccaccacatctggctaatttttgtatttttagtagagacggggtttcaccatgttggccaggctggtctcgaactcctgacctcaggtgatctgcccacctcggcctccccaagtgctgggattacaggcatcagccaccatgcccggcccatgccagcctctcttctaagcattttgtatttatcatcttatttaatcctcatgacaaccttatgaggtaggcacatactattattattcccatttaacagatggggaaattgaggcaaggagaagctaagtaacttactcaagatcacagaactctaagtggtagaacaagaaggcaaacacagcaggcagcctgactcggtgtcctcaaaatctaactacattgcctctctgaggaaaaaaaaaaaaaaaaacaaccagtatccatttagcaccttaaagctactgggcaaatctaacagcctgattagcagcactggtttcagcttcattataacaacagggctgtgcttactctctgaactgaccagaaaacagagcaagatgttgcaggagtaatcatgcctttcaaacagaattcaagggagttcttgtggtggatacagcccacccagcagagcctcaggaagtctctcctctaacagtccgcattaaaggggacaccaggtatttgaaagccaggaagaaatgcctgggattggaggagccaaggtcacatcmcacctgtacaatttctctcaaggctcaagaatttagggcaggcacagtggctcatgcctgtaatcccaacactttgtaatcccagctactggggaggctgagggaggagaatcatttaaaaccaggaggcggaggttacagtgagccaagatcgcaccactgtgctccagcctgggcgacagagtgagactctgtctcaaaaaaaaaaaaaaaaaaaaaaaagaagagaggctggcacatagtaaaggcactataaatacacatgttagcaattgttatttatttatttatttatttattttgagatggagttttgctcttgttgcccgagctggagtgcaatggcatgatctcggcccactgcaacctccacctcccaggttcaagcgattctcctgcctcagcctcctgagtagctgggttacaggagcgcgccaccaccatgcccggctaattttttgtagttttagtagaaacggggtttcaccatgttagccaggctgatcttgaactcttgacctcaggtgatctgcccgcctcctcggcctcccaaagtgctgggattacaggcgtgagtcactgcgcccagccagttgtttttttgtttgtttgtttgttttttgagacggagtctcactctgtcgacaggctggagtgcagtggcgcgatctcagctcactgaaacctctgcctcccgggttcaagtgattctcctgcctcagcctcccgagtagctgggaccacaggcaggcgccactacacccagctaatttttgtatttttagtagagatggggtttcaccatgttggccaggctggtctcgatctcttgacctcgtgatccaccctcagcctcccaaaatgctgggattacaggtgtaagctaccgcgcctggtcagctgttgttatttttaagtgctctcttattcatacttgggtagacctgctttaatctgtagtgataagatgggaaggccccaggagccaggttttcccagtgcctgactctggctaataatcctctgccctgctaatgtcactgcttctcttgttttctttgtgggtagggtgatggcaggtaagggatgctacaagagtaagaagggaccctgaagctgcctccttccaacctgacacctatycttctctttgttcaggccgcaggcatggttttggtcaactgatgtttgcagatggtggcacctacctgggtcattttgagaatgggctctttaatggctttggggtattgaccttctcagatggttcaaggtgggtatgaggtcattcctttcttagccttaaataagggagggtctgacagaaaaatgggactctggtaaatatctggtcaatcctgaccttgtctcactccctgcagaacacagatgagkaataagtagttcttttattagctattttttaagtggacctaaaatttgaaatgtcaaccaagtgagtgactttccaccccactcccattcacatcctatcttctttccttgagatcagggcttcatgtcatatatactctctgctccttgggaataggtggggtaggyggagctatgtgactggtagaatcggcttgctccttagcatcattaaataacagagatcagcagctgctcgactccgttcatctggacagctaactttccactgaaggctaacttcttggtgtttctgcaggtatgagggggagtttgcccagggcaagtttaatggcgtcggagtcttcattcgatatgacaacatgacctttgagggggaatttaaaaatggcagagtagatggttttggtaagttgcagcccagcaggatggctgacttaggtgggcataatatgggtggaaatatacctgtttagttttaatcctgcgggtgtccagcaatccatagtggccgtccctgacacctatccattgaactcatcaatagagtactcctgagtagagctgggagtttttctcttctttggcctggacatatcaaggccaaagatatgtctcatctttgagacattaatgccattgtcactcccatattttctctgccctcctcaaaggcctgctgactttcccygatggttctcatggaatcccccgcaatgaaggtctctttgagaacaacaagctgctgcgrcgtgagaagtgttctgccattgttcagcgggcccagagcgcctccaagtcagccagaaatctcactgcctgacagcgcagtgggcaccagctgataagtattgggtaaagccagtgcccctgttgttgattcgaggtgaacaaatgaatcagagctgagatgagttgacaatgacagtggagcagaggccttgtatgtgccctgtcacctgccattccagaactggaccacagaaaagtgctgaggatgctggccagcagaccctgcagcagtcattggtggttctgtctttccctaacccttatgtgctggaggacagaggagccacctcttctcactggttgatactctgttcctaagacctcaggttacccagtgtagcctgctgtgacccttctgcttcattttctgccaagtgatacagaaccttcgttctgctgctttggggacaggtgatcctagccccagcttagggccagtgctctgtgccactctggagaaatagggaaaagataggggtggctcagtacagcagccctgtgaaagtcaaggccagagcttttcttttttaatttttttattattattattattattttattttttatttttgagatggagttttactctcgcccaggctagagtgcagtggcatgatctcagctcactgcaacttctgcctcccaggttcaagcaattcccctgcctcagcttcctgagtagctgggactacaggagcgcgccaccacacccagctaatttttgtatttttttttagtagagacggggtttcaccatattggccaggctggtctcaaactcctgacctcgtgatccacccgccttggtctcccaaagtgctgggattacaggcgtgagccaccacgctcagcctttaattttattattataaaaaattgagccagggtcttgctatgtggctcaggctcatctcaaaatcctgggctcaagtgatcctcctgcctgggcctgccaaagtgctaggattgcaggtgtgagccactgtgcctggctggcagagcttttccatatgttactcctcatgctggttggaatcatggctgcaggcttccacttggtctgatcagactggtattcattcctgcctatgtccccgtgaaggattcggtaagagtgctatttcctcctccctttagaagacaggctgtcttctttcatcaacttagagcagataatccccatgtgtgcctctctccttccttagatggggaacaggatccctttttgggacaatcaagaaaaaaactcatgtaaacagtaatcttattacttgtatttgtgactaactccagggaaaagggtagaatatttaggccacttcaggcactaccatggagtgaactgaattcatacggatggcttgggctgacacagtttcttcccagtggaccaataaatcagactcacccgaacccctggggttttggtagaattggacctactctaggactgtggggaactaaaggagcatttggctcactgtagctcttctatcatgagccttgaccgtcaggccgcaatcagaccttactgatgggatctctgcagtttattacgtaggcctcccgttaccctggtacccaaatacgtcccccacctctagctccctagcctcacattgaatgtctcttcaacagcagattgtggtggaagttatagccgygtgcctctatttattctctgaattgtactgtagaaaaaggtgtttataaagaataaagaaatcaccagaactgcctatacctagttttcctgactttctggccctgcgtcttcatgaatatcaacccatttgctgtttgtaaaagttaatcgggttagcccttggaactgaccctgcacactttatcaagtcatctaattttctcagcctctacagaggaggacgtatgaacttttttttcttatttaaatcagacaatctcaggctgtcccaactagtaggtagcacagctgggtgagatttgtaaccgagcctttctgattccagctccctttactggacctctctcaccctgagcatcagagtacttaagtcctgagactagttatggccacacctgctgggttacctctggcaggtccactcctgccggagtttccctttttctgcaacaggagagtggtggaacattgacccccacgctaacccttttacatgcacgtccttgttggaggaaggtactattattatccctgtattacagatgaggctcagggaagttaagcagtttctccaaggtcccatagacactaaggggcagatcccagaacttaaacccagacctgtttaagcccagaggctgagctcttacccagtgcactaccctgcctgcctagccctaacttttcccccaagtcctaaacttgattctcctctgagccttgctcctctggaagttgcctgtgagaggaccccaggcactaagccccaagctgtagtgccattcagagcctggttttgggttgaagattgagatcttttattttctctcctttagcctctgccctaaacaagtatctatttacctctctttttaaccttacactttcttttaaggagtaatttttttacaatgtatctccatttttctgccactagtcaaatattaccactgaaaaaggttaaatattttggagaaagcatccttttttgttgttgttgttgagatggagttttgctcttgtggcacaggctggagtgccatgacacgatctcggcccattgcaacctccacctcccacgttcaagcgattcttgtgcctcagcctcctgagtagctgggattacaggcgtgtgccaccacgcccggctaatttttgtatttttagtagacatggggttttgccgtgttgatcaggctggtctcaaactcttgacctcatgtgatcctcctgcctccgcctcccaaagtgctgcctggccctaaacacttagcactttaatcaaaaaggatgctgaaggggtgcagtggctcacgcctataatcccagcactttgggaggccgaggcaggaagatcacctgaggtcaggagttcgagaccagcctgaccaacatggcgaaacgctgtctctactaaaaatacaaaaattagccgggcatggtggtgaacacctgtaattccagctactcgggagggtgaggcaggggagtcacttgaatctgggaggcagaggttgtagtgagccgagatcgtgccactgcacaccagcctgaatgacagagcaagactctgtctcaaaaaaataaaataaaagtgctaagtgtttgtttctaaatagctcacttgctctcttttgcctcttaccccttccccaggtctccagtaagtgaatgcctgttggctcagtattgctggggacactcttcgagctgggagaaggcagaccatcagagctcttttgcctttagaaaggttcttgacatctggccaggaaacctaagatctgcatagcaatagagtgtccatctttatatagccacactaattttttctgttaaattttattatagtaacaaagtgactatttttaataataaaagcagagtgcctgtaggcaagtggatggccctatctcaggccaagtctccttagtgtttcagacctaggctgaccagaatagtcttctagaatgtaacatttatccaccaggtgtcattatttaccaatctgacaagccactgggctgtctccgtgcattcaatggttggaatcaaggctacagaccagaataggagatgaatgaaaatagatttagaaaagggcgttgtggctggaatgcagcttgcagtgtggagggcagggatgggagggtaaagagggctctttgaaagaccagtgtcactttcctgatcaagtttcttaagctgatacttccctggaaggagtcagaacttgggtttgtaggagtagccctggcctccagctgcattgtgctagactcaggtttgaagccccaaatctaagtagtcccccctttgataaattcccggccgggtgcagtggctcacagctgtaatcccagcactttgggaggccgaggcagttggatcacctgaggtcaggagttcaagaccagcctggccaacacggtgaaaccccatctctgctaaaaatacaaaaattagctgggcgtggtggcaggcgcctgtaatcccagctactcgggaggctgaggcaggagaatcgcttgaacccaggaggcgagatcatgccattgcactccagcctgggtgacagagtgaaactctgtctcaaaaaaaaaaaaaaagaaaaaaaaattcccttactgtgcctacttgcccctctgcccttcctttctgacttcatgtgcctcagggcgtaggaaagcatccacagtagaaagataaattgagaaattgctccttcccagtcttcagaccagagacacagtttaggatccaaaagggagaggtcaggggccgttagaataggagatatgcatgggcgtgcctgtgaaaggctgcctggaggaccacagcaggcaaaggagcctctatcggctccccgctgcctgccaccctcatccccctgtgctctccgcttcaggctgcaagtgcaaggcaggaggctgagatgggctcaggccagccatggaccctgcctgccctcagagccagccgttgctggtgaaatccatgcgcagtgcctcctcctcagcggggctcagctcctgcaagggggcgcggcaggggcctccatagtagccaaaccagtccatgattttcttcagccctgggatcccaaagcgccgggtcacctgcaaagcagggcctgttagaagagactgagaaatttgctgaacacccatatctggaactcggagatctgtcactttcagaacattgaagtcctaccctcttcccccaggaaagtaactgccaactctatggcacccagggtacattgggaatccagatttagagaccagagagcaggtctgtaatagcaaaatacaaaaacttcagattggggaagaagagtgcctcctttggttttaggagaaaaatccactccaacagagaggagagtggtatttggtcctcaagctggggtgggagaagacagcaaggctgcaggtctaggcactagagcatcagcagtctgcagcccagctccctgaaacctgacgcaggtcacaccagacctgggaagtcaggaaggggaaggatctgtgagagtctcaggcacagcccagacctctactccccttgcatgtggctgccctcacctccccatagctcctcctgaccctaacactaaatggtctcccaggaaaagcaaagcatcatttcccaaggaagttttgttgtataaactgtatgtcatttacttattatctctgagtaagttctcctgtctaaaaaaggaaggggctggacaacatgatctctaaaggcttttccctgataatgggggacctaaagctattgttataatttattcatttatttttatttatttttttttttgagacagtcttgctctgtcacccaggctggagtgcagtgtcctgatctcagctcattgcaatctctgcctcctgggttcaagtgattctcctgcctcagcctcctgagtagctgagattacaggcacctgccaccacaccaagctcgttttattttattttatttttgtatttttagtagagacagggcttcgccatgttggccaggctggtctcaaactcctgacctcaagtgatctgcccgcctcggcctcccaaagtgctaggattacaggcatgagccactgcacccgtaataatttatttatttttattttatgtttatgtttttgagacagggtctcactgtgccactcaggctagagtgcagtggtatgatcatggctcactgtagcctagacctcctgggctcaatcgattctcccacctcagcctccacagcaccttggacttcaggtgcatgacagcatgcctggctaatttttgcattttttgtagagacgaggtcttgctatgttgctcaggctagtcacaaactcctgagctcaagtgatctgcccaccttggcctcccaaagtcctgggattacaggcatgagccacggcgcctggcctattataatttaaaatcgtgtatggaatattacagaataaatgaagcatcaaatttccttgcttttggtatagcaactggttatttcatgctgatcagaaatattagatgaatctttcactacctaaaaactacaaaagtagtccttaagaaagttttatttggagagaagctaaaaccttaggaggataaaaataaaaggttgtttgggataaaaaggccaggaaccactgatgaaagattgactaataactttaccactagagtcccggaggctttatcaagcatggattttttttcttggaatgggtggtaagccaccctcctgcaggcctcgccacccccatgatgttctaatagcctggcctttttacccaaagcctgagtaggtgggaaagacccaggatacaggatggaaataagaggtgcccagagaaaagctcactcctgccatgggtttccaaagatatctgatgtggcccctcttcaaaccctaagaaggggttggtggcaaagactgtagaaagtcctaaatatagccaggggcaggaggcaggctggtgggaaggtggaggaaggacattgtgtttgaccagggatgggcaatagagtgacatcaagctgttctcggggtgtctgagcctacagcctaggcagcagaaaggtgttccaggcattcctgggtatgtgcccagagctggcacaggagaggacacagaatgaagggtgaggcaggatggggtagggcgggatgacacgcagagatctgggatgacagctaggcatccactcttccccaggggcagcccaagctgcttcatctgtgaaatgagtgataacaacacctaccccatagagacgtcccaagggccagatgagaaaaacactgctaatattagaccagttcccatgagccctggaagccgctccgtttcctgtcccggtggcatgcgggttctgggaccttcgttttcagaggtgcactgggagtgggagagcagaggccccaccccagtggaatgttcagtatgtgcaggacggcctgtgcccaacggggccctcgtttctgcaagttcttataacctatttatagaaggtcccatctcagaagcaccttcacctccagagggactcagatttacctcctcagctgtcgtttctgtaaatctaagttaatctgcccctttgaggtaaggatacagctgtgagggagctctagagcccacccatcactttacccaaacaaaatattgtggagtgcctagctcagcctgggactgcagccaggcccatgaggcccttaccttgcatgcaaaacttaaggggaggccaaaaatctcaatcatcaaaataagtaatatttcaatgcaatttttttttttttgaaacagtcccactctgtcgcccaggctggagtgcagtggtacgatctcggctcactgcaacttccgcctcctgagttcgagtgatttctcctgcctcagtctcctgagtagctgggattacaggtgaccaacaccatgcctggctaatttttgtatttttaatagagagagggtttcaccatgttggccaggctgatctcgaactcctgacctcaggcgatctgcctgcctcggcctcccaaagtgctt

SEQ ID NO: 95255 - DNA, 54718 bp, Homo sapiens
cgcaagcagaagaagcgggacgctctggccgcctcgcatgagccgcccccagagcccgaggagatcgtaagggtcctggggaggacaccgcgagggggcggagggggagcccgggaggcttcggattgctgggacggcccgtgactgctgcgtccacatctgcagactggccytgtggatgaggagaccttcctgaaagctgcggtggaggggaaaatgaaggtcattgagaagttcctggctgacggggggtcagccgacacgtgcgaccaggtgatgctcctagccgcccctgaccagcctccctgtcagttgccacccccactccgttcggctcctgggtcagcccactgtgagcctatttgagaggaggcaccggtgttctttggatgggtgggtggctggggcgctcagaatgggtgtcccttccccgtacaggaattgacctaaatccttaaacccttttccaacttgaatcacctgcagagcaacaaatgtcacatgtttgtttaggaaagaaagaaaaatagaatcaaataaaaacagaccaggaccagaagatgtgggctcaaatcccatctctctcactcacgagttgtgggacctgtggctgggtcggtgccctctccatgcctcagtttcctcctctgtaaaatggcctacttccctcacaacatgttacggtgatcaaatggaatattaggctgggcactgtggctcacgtctgtaatcccagcactttaggtcaaggtgggaggagcgcttgagcctaggagttcaagaccagcctaagcaacagagtgagaccctgtctctatacatatatagataaagatatagattttttttttttttggtaaaaggaaaaaaggaatattagcacctcagtaactcagtattcactgaatgaatgaagaaactatcaagcatgtgttaagatatgatatttttgtttctcatggtatagtactgtactttttttttttttttttgagacagagtctcactctgtcacccaggctggagtgcagtggcgcaatctcagctcactgcaactttcgcctcttgggctcaagcaatcctcccacctcagcctcccaaagtgttgggattacaggcttgaaccaccactcctggcctatttttttttcatggtaaaacataacgtgaaatgttccactttaaccattttaagtgtacaattcagtggcattaattacattcacaatgttgtgcagccatattttctttttttttctttttctttttttttgagatggagtcttgctctgtcccccaggctggagtgcagcggtgcgatctcagctcacagcagcctccacctcccaggttcaagtgattctcctgcctcagcctcctgagtagctgggattacaggcgcccgccaccacacccggctaatttgtttatttttagtagagacaaggtttcaacatgttggcccttgacaacaagctggtcttgaactcatgatctcaggtgatccacccaccttggcctcccaaagtgctgggattacaggcatgagccaccgtgtccggccccttacagccatattttctaaatttttcatcacccatcatacttctttttgttttgcctgaaactgcctctttcacacttcccggggtgctttcttgctctcgtatcctggaatttggcacattagtggttttccacctttggtctgcattattgtagacttggaccacatgtcctttctgttctttagactccagagtcttcatcctctcagtctgtccaactacctcctacttccgagcaccatgctaggtgccagaatacaaaaaaacaaaaaaagcaaaacaaaacaaaaaaacagaccagggttggttccttggggagactgacatgtaaccagatcattagaataaggaaagatactcactgtgtgtgtcctgtaaccagatcatgagaatatggaaagatattgtggcttgagcgtttcaaaagtccaaggcagaaaggagaaggggaaaagtttattctttctttgaatcagtgatcagtgtcacctgttcatgctggccttgtgctaggcacttggggagtccagcaagacttgacctgccctcgaacacactctcacagttaagggtcatctgggccctagggaagccctggcctagaggtttcaaggaaatgatggcatttgagctgcatcttgaaggagtagcagattttatcaagcactcccaggaagtgagggcaaaacaggcatgcttggcagaggaaaccacctgtagagaggcatggcttgatgtgcctggggggcagtgagaaggtcgggttccctggggcagagrgctcccaggctggtctggatagagcataagggagctggcagaacacagaaaacatgggggccaagcacaggggtgagaatcaagctggggggaaggcctgggcctcagcttgggtgggagatgggctcaggcctggagccagaggccaggccctgacagcctctctggggacagttccgtcggacagcactgcaccgagcttccctggaaggccacatggaaatcctggagaagcttctagataatggggccactgtggacttccaggatcgggtgagtgagagggcaggtattcaatgggagacaggaggtgggtccagcactgacagacaccctctccctgccacctgtgccaacctgaagcataaacaggttgctcaggtgccagactccacctcagtggcttatgtgaccttgagtaagccccttctcctccctaagcatcctctgtgagtctggcttggaccagatgggccctgagtgttcttctgttccacttggtccattgcccatgcccaggcctgctccctgtacctttcccctagatatccctctgccttcctggctggggtacattacccccgaatactttcttccctgcagctctgtagttagaccccctcatttctttctagctggactgcacagccatgcattgggcctgccgcgggggccacttagaggtggtgaaacttctgcaaagccatggagcagacaccaatgtgagggataaggtgaggcaaaaacactcagaagcaacagatattggggtggctgtggggagaaaggcaggggtccaagggcaggaaagcctagggggcaggaaggtagtgagctagtctggtttctggctgcagagcagggaagctaaaacagtgtcctactgggcctcccagcccagggatgggtccctgccatccacacaggcccttgaggaaccaccatctgaggataggagcaggaagagcagacaagaagggaagacaagagactcactgtgttgggggctttgggaccactcaaaagatgcaagatttgttcatgttatctgtcattatccttctgtctacctatctattcatctatccgtctatccatccatccattcctccatttattcatcccctcattcatttatttatttatgcaccatccttctattcattcattatttcatgtacaaccttgaacaagtgacagcctctgagcttctgttgctcatctgtgaaatgtcttgcagagttcttgtgtagcttaggtgggaaaacatgtgtaaatgaattatttattcaacataaggcaaatgtcttgtaagcttttgccatgtccattacatagtcatctctcaataaatgacatctattatgattattaaaagaagggtagaagagtgagcagctgggtgagaggagaatcacagaaggcttcccagaggaagtggcatttaaggctttagagttaggccattggataggatggtaagaaattgtaccattctctgcccctccaaggctcaggccttggcactaggacttggaagagggattaagctggagttaggacagcccccgccttcccaggggtaccacagttcaggccccgtcaactagcagttcctgattcctcccacccagctgctgagcaccccgctgcacgtggcagtccggacagggcaggtggagattgtggagcactttctatccctgggcctggaaatcaatgccagagacagggtgagtgctagcctgtccgctgctcacccgccatgggtgtgtgggcagcctgcgggcccctacaggtggtgtccttcctcctggggccttcaggacttggctcctgagcagggtctccagcccacctcccatcacccttgcctcctcccactgcccacaagggccatagtgagtgccacactgactctaggaaggggatactgccctgcatgacgctgtgaggctcaaccgctacaaaatcatcaaactgctgctcctgcatggggctgacatgatgaccaagaacctggtaagctcattccctccttgattcagtcactggcgtgagcactcatacagtggaggtgctgtcctggtccctggagcagcccccgcctagggacatgtatcattggctctggccagcaccatagtacataaacttgtcctcttccagagcaccattccaactgtccgccccattctctatgtgtgtctatgtccagagtgcaagtgcagagagacagcaggaggggcagcaagaggacttcccaaagacccccaagtaggccagagggggtcctcaagtactggcccaaggaggccagaatcatgaaaggccagagctggaagggaccgagcactcagctggcatgacagttcctagcaccccatgtcagctcctgtggtctttgagttttcttaggatctaggcaggaagtccttggaaggggaaggtgcccagggaacaccttggactagggaacacttagtccaagttcttctttggggcccagagcattcacaaaaggaggccatgagagagtccctcgggctcaagaaaggctaaagggataatgagaaaagcaggaaaatatggagaaggtataaatgaggggttttcaccctcagcattattgacatttagggccgggtgattgtttgttgtaggggaccatcctatgccttgtaggatatttaagcaacattcttggcctctgcccactagatgccagtagtacccatcccctagtgtgacaaccaaaagtatcttcacacaatgccagttgcccccatttgagaagcactggtggtgtcaatgagggtaccttctgtgaaagccttcaggacagttaacagattttctcttgccaacccccacgccccgtcccgccccctccaggcaggaaagaccccgacggacctggtgcagctctggcaggctgatacccggcacgccctggagcatcctgagccgggggctgagcataacgggctggaggggcctaatgatagtgggcgagagacccctcagcctgtgccagcccagtgaatgcgtgccccagcccagccagctacccagcccctctctgtgtgcagccggagggtcctaagaatggctcccggagctaactgagggcccagccttttttctgcatgatccaggagcacataccacaaactaccacaataaaaaagctgtttttgctaattgcgatgttcatttccacttgtgtctgaaatctttgggaatgaaggaagactgggggcaaatgctggtttggggaggagggaaactgggagccggttggccctctgagccagccctgcagcttctttactgtggtctcttttcctttcctccctgccactcaacttttcctgccccttctcacatctccagggccaggcttggcccctgcatggattgacttggtaatacactcatcctggcccccttcctggtgcctgctgtcctgtggggctgtgagtggctagcacaggcttgtcacgtggctgccttggcaggaggagcctggtaagggagcggggcaggggatggacagcctgtcacaggcagcttcttgcccagccttgccacacctcccacagggcaggacctgctcagccaatcagctccaccaacctcagaactgcccgtggaaacctggctgggcttctggcttcagagctgggaattgtgggaggagggcccagatcccactggagataccgaaggagatactctttagtattgggatcccagaaaccagtcctatatctggccagagggacactgggttgtggcatctctctagctgctacccagaaggaacagggccccctggggcctataggccttgcccctgaccctgggaacacccagctcaggcctgccccagtggccacaagtcagggaggccgcaaatttttaactagaaacattgatcattaatagggggttagaaagagttcaaactaagtctcactctgggacatagaccaattgtgcttcaggcctcctgcagagatgctgggtccccaagtctggtcttctgtgaggcaggggctaagcaggagcttgtccaggaatgtgggggtctgggcctcaggggaggggaagaaggtggacattgcgggtatctacccccctgtgaccacccccttcactgccactgcagaggtggactatgggaaactggaggagaatctgcacaaactgggcaccttccccttccgaggtaagtggggctgtcctctgtgggacctggggagatgtgagtggccctttagccagagaccaagggagggtacacaggctctgtcaagctgtccagggatagtctggtactcagtgggtcattttattatgggagaggaacaggggagactggtctggagtcaggagacaggcaggaagctccacgctggcctgtaaccttaagctaaacctcacctgcttcagtttacccagctgtaaactgttaaagtgcctttgtagctcccagagtgattctgaggttggactggataatgggcgtgaaagtccttgtcaaccttgtcacttggtgcagatgtgaaggcatgtggctggggtcacgtggcagcccagccacagtcccagttccctccaaagtttgtttgtacattctcttctggacaaagcctccttgccagaattagttctcctgtgaccccttggctcctgtgactcctgttgtggctcctgtgaccccatctctctttacacatgggtctccccaactctgaggttagggaccagatgatatttgcaacaatcaacatgtaacagagtcccaggcacaataaatgaaggtagaagaaaatgtcaaattctgcctgccctgctccgcccatccccattccttactgcacaatcccctgaggcagtgctctctgtaggaccatcccacagatgggaatctgggcctcagagtgacatggtcactgcccarggtcattcggctaacacatagctgagctgaggtttgcacctcgtctgactgcatggcccatgctccattttactccctcgctgactctcattataaaccctttggagctgctaggccacactatttcaacggagtgtctggtcagcactagctttgttgtggctgctattgaggcagtatcgtgtagactgtggactctggtttcaaatcacagctctggagtgagcgcctgtaatcccaacactttgggaggccgaggcggagggatcatgaggtcaggagttcaagaccagcctggccaacatagtgaaaccccgtctctactaaaaatgcaaaaattagctgggcgtggtggtgtgtgcctgtaatcccagctactcgggagactgaggcaggagaatcgcttgaacccgggaggcagagattgcagtgagctgagatcataccattgcactctagcccgggcgacagagcaagactccatctcaaaaaaaaaaaaaaaaatcaaatcacatctctggcactgacttagtgtgggatgattgctgtccctatcggacacatgggagtgataatgctcatattatgggatggttggacaaaaaaatctgagagaatgcaagtgaaatcgtgctataaattgtggagtaatatacattggaaggtactgattccaatggtaataatgattaaaatgacagtgtgattggcattgcagcaaagctgctttgtgactgtgacccctggcctgatggacacgttgatcattcatagctcagtactgagggaatgtgccccttccttggggacaatgaatgccctgtggagggccacgttgagcagggcacaactgttaggtttctgctggtgcttggctcgtggggcctggaggtttggtgaggtcctggttctcttgaagtgagaagcattttgagcctctaagtgaagaccttacttcagcttcaaggttcaaggatgctctagttcagggtggggagggtggactttgcatctggtgtttgcctgacacccagagaatccacagagacccccagactcttctctggaccctcccttctgggccacccacccactcttgcagagggcatggggtgcccaggagcacaggcttccgtggatttagcaggctgtgggctgcacatacccacttgtctgtctccctcgcaacctatgcaggctccagctcccatctgatcactcacccacacaccagagagccagcggggtgtggtaggaagagcccagcatcttgagttagaggacctgggcaagaatcctgccacttctgccagttaacagagaccttggggaaaccacttaacctttcaaatccagtcctcgttttagaataggaactgagccttcaggcttctagccacagggtcaatataatcctcccaaggcactgtcacagaaaacacagagatagagggtcccttccctgcttccagggtgcagccaaaatgcccaggaaggaagacacaaacaactttagctctgaaatctgtgtttctcttgccctgtcctggcccctgaggtagactttgcagcccaacactcaggctgaggagggaacgtatcacattgtaagggcctcctgcagccagttaaaggtcctctgaagaggagatgagggccaggcacagtggmttactcctgtaatcccagcactttgggaggccaaggcaggaggatctcttgagaccaggagttggagaccagcctggccaacatagtgagaccctgtctctattaaaacaaataaataggaggtggaaagctgccctggatgaatcagtgaagagttagagattcttctggaaagcactccctgaaactgtgtagcttttttttttgagacagagtcttgctctgtcgctcaggctggagtgcagtggcatgatttgcctcactgaaacctccgcttcctgggttcaagcgattctcatgcctcagcctcctgagtagctgggattacaggtgcctgccaccacgcctggctaatttttgtatttttagtagagatggggtttcaccatgttggccaagctggtcttgaactcctgacmtcacggtccgccggcctcggcctcccaaagtgctgggattacaggcgtgagccaccgcgctgggcctcttatttatttatttatttttaagatggggtctcagtctgccacccaggctggactgcagtggcacgatctcggctcactgcaacctctgcctcctgggactaaagcaatctgcccatctcagcctcccgagtagctgggaccaaaggtgcacaccactatacccggctaattttttgtatttttagtagagatgggattttgccgtgttgcccaggctgatctcgaattcctgagctcaagtgatctgcctgcctctgcctcccaaaatgctgggattacaggcatgagccaccatgcccggccccgtgtagctctttttaaaaaatctttttagcattgctaatttgtactgattatttgaatagagagtattctttttgttttttctttcttttttttttttttttgtgatggagtcttgctctgtctcccaggctgcagtgcagtggcacgatctcggcttactgcaagctctgccttccaggttcacgccattttcctgcctcagcctcctgagtagctgggactacaggctcccaccaccatgcacggctaattttttktktgtgtgtgtgtatttttagtagagatggggtttcaccgtgttagccaggatggtctcaatctcctgacctcgtgatcgtccgcctcggcctcccaaagtgttgggattacaggcgtgagccacagcgcccagccaagagtattctttttaaataaaaattatgaccagagactagaggaaggggtcattacagaagggctctatggccctgaactcacacccataaacaccctcaaagatggactttgaattgttatttccaaatgaggttagccaaccacagaactagtccagcaggactgggaagatgaggttctccataaaacacttgtgtcctattccttccatacatagagtggaccatgctttcttgcaaagatataatattttgtatatattaaaaccattactctgttaaagaaaatattttgtttaaagcatcacaatgtttacaaccccattttggcatttcttatttttttttaaatgggctagatgcttttgaggggaaaaaaaaatacagtggcccaggcctgtttataccctgagaggccttggagattaattaggcttttagttgtctgcacctatggaaagcctggccagccagcccacctgctcacaacccgaaccatgcctatttatgggggggcaaattctgggtttgtaggtgcctcactaaggcaagaggtagcagctaccatcccggagtggccccagggatctagacccgatgaagtctcctgtccactctgccttctcagcccactgcttgcctctccaccctcagcccattgtgacctcatgttagttactccagaatgagctccttcctgggttcttttccctctgaactctgccctgtagtgaggcgaggggctgcaaatgaggatggaatatgccaggctggcagcagacatgggcactggatggaggtgcactggtctcagatggctaggaatggataccagcccagtcaaggggatcattctgtcatggccagcctgacccagcatactttgccccctgggggccaccagatggggagagagagaaaccaaagactggaagatacaaaggcctaagttgtagaatggattccaagcagaaggcagaaggactcagaattggagaagcagccctttcactgagcctggggacagctgtcagggtaggagacaggacccaggcctcaggcaatgcctgccaggctagacatgagggatgctgcggcctctccccaccccactctccccaccccacccgcaactgccttcctcacaatggggttcattgttgaggtggtggggggcacctagggagggtgcagcagggggcctgcctgtcagacatccttggggagcctgccctttcaagcatgaatcataccaccagagatcacccagcktgctcttagctctgcctgcctggtgtagggtcctggagaccttcttggagctcatccagcagccatcatgcaaggtggtgctggggactgccctcttgctaggaggtggaggtctcatgctgtgggttcagagaaagaggagaagaaaggaaacctctgagtgtccatcagacaaggacaagtcaccagaatcccataaagcaaagaatgaaagctggattaaatcccactttagccgcctttccgaagagaagctggccctcgacaacaatgccagcgctagtggcaatgctacccagactgagagtgggagtgaagaggtcagctccacggttcacatagagaccttcaccacgaggcacggagaagtgggctccgctctgcaccgggaatccttcaccagcaggcagaagacatctgggccctcagtgatccaagagatccaccaggagtctggaaaagccccatccactgatgaggccacgtgggccgctgtggctgcctgcaccaaggagattgacacccaggggcggcacctggctcactccatgctgcagcgggccatagcttaccagcactcaggtcacctagagtccaaggacatcaaccaggaggagctgagggccctcgaggaggtagagatgaagctgcaaaagaatttcctcacccagcgggaaaacaccatagctggtgccaatcacacacacaccttctatggccacagtcaccacagtcaccatggccacccaagccaccagagccacagcctgcctaatcgcagacactagatctgtgacttcttggaagccacctaaccatggatggagacgcccctgcccccagcaaggctggctcacacacacgtctgttttctctcctatggggccatctatgcaggccagggtgagatgctgtgcccaaatccctactttcttaggctcctcacggggattatgggctctttaaactccatgagtggggtctgccacagaagatggcccctgttggagggagagctgggaggacacagcgcaggtgagatagaccctgaggcccctgaagacccaccaagagaagacagatgggagcaggcaagagccccacactgatgtcattgcctggaacggagccaataaagctttgtgtgccttcactctgagtccaggggctctgtgggcagcctaaggtctggcagggatggagggagggggctccctctccagcagtcctctggagtggagtggagaaaaggcccccgacctggggccttttcactgggcctcatttaaagctccataaaacagctaccctggtctcaggttctggaaaaggggtacctctagacgtctcaacacccccaatctgatgttgccagggaagaggggagcagccaggtattgggcttggaggagaaacaggctttcagaggagagtaactaagccaggtgggaatgagggcccctgtcgtcttggtgctatctttgctctcaagtcatgtggcatcctacaaggcagttctctcaccagccccacctgcttcctggggccccttgggatccatgttagtacctccccaccacctaagtctacagctactgagtgagcacaacactttcttcttgtttgtttaacttaatttaatttaatttaatttaatttaattttaagttctgagttacatgggcaggatgttcaggtttgttacataggtaaacgtgtgccatggtggtttgctgcacctatcaacacgtcacctaaggtatttatttagccctgcgtgcattagctatttaacctgatcatcttgggttcttttttttcttttccctttttttcttgttttttatgtatgtatattttgagacagggtttcactcctgctgcctaggctggagtgcagaggcgtgatcacggctcactgcaacctctgcctcttgggttcgagcgatcctcccacctcagcttcccaagtagctgggactgcaggtgtgtggaaccacacctggctaattttttttttttcttttctttcattttgtgtgtgtgtgtgtgtgtgtgtgtgtgtgtgtgtgtgtgtgtgtgtgacagagtctcgcttcattgcccaggctggagtacagtggcgcgatcttggctcactgcaacctctgcctcccgggttcatgcggttctcatgcctcagcctcccgagtagctaaggccaaaggcacacaccaccatgcctggcaaattttttttgtatttttagtagagatggggttttgccatgttgcccaggctggattacagtggtgatatcatagttcactgcagcctcagactcaaactggcaaaattcaaataaagtccttagttaatgacattgtaccagtgttaattctttggttctggtcatcatattatagctaggtaagacattatcattggtggaggctgggtgaaggatgtatagaaaatccctgtacttttttttttttttttttgagacggagtcttgctctgtggcccaggctggagtgcagtggtgcgatctcggctcattgcaagcttcrcctcccgggttcrtgccattctcctgcctcagtctctcgagtagctgggactacaggcgcccgccaccacgcctggctaattttttccatttttagtagagacggggtttcactgtgttagccaggatgktctccatctcctgacttcgtgatccgccagcctcggcctcccaaagtgctgagattacaggtgggagccaccgtgcccagccagaaaatccctgtactatttttgaaacttttctgtaaatctaaaagtaattcaatatttcaagttaaaaaaaaagttttcagacaatttgattatgagtgtgtgtcaaagtttgattatcgttgtaatgcaagcaaaatgacctgtaagcagctaactcaaatatatactcttggtaagaatatttttattaaaaaaagaatggtcaggctgggcgtggtgactcctgtctgtaatccctgcactttgggaggccgagatgggcagatcacttgaggtcaggagtttgtgagaccagcctggacaacctcgtgaaacctcgtctctactaaatatgcaaaaatgagctgggcatggtggtgcccaccttaatcccagctgcttgggaggctgagttgggaggattgcttgaatccaggaggcggaggttgcagtgaacagtgatcgctccactgcactttagcctgggcgacagagtgagactctgtctcaaaaaaaaaaaaaaaaaaaaaagagaatggtcagatcactcactgttaagactacgtaaagacaaagaagagtagttaacagcttctaggctcttgcctgagagttggctgggagggtggctaattttccagatcaagtcttaattccattaaagttcattgggggccgaacacggcggctcacgcctgtaatcccagcactttgggaggctgaggcaggtgggtcatctgagatcaggagtttgagaccagcctggccaacatggtgaaatcccatctctactaaaaatacaaaaaattagctgggtgtggtggcaggcacctgtaatctcagctactcgggaggctgagacagaagaattgcttgaacctgggaggtggaggttgcagtgagccgagaccatgccactgccctccagcctgggtaacagagccagactctgtctcaaaaaaaacataaaaaagaaaaaaataaataaagttcatcacaaaaatgcttaagcatttcatcaggaatgtaatttctttccagagggaggttatgaattatgtcatgcaaaaaactttggccgcagaccagggcagaaaaaaataaagaacttctttttcttttgcacaacaaattgtcaacacacacctcaacacctatgctaggcaccacacaggaggccagaatgcatccaggcaaagtaaggcaagcactgggcaaggaaaacagaatgctgggtagccgacttgagcttgttggcccgcatttggaaggtgttccaggcagaagggaacaacacaagcaagggtgcagagggagggaagtgcagtgtctggggaaccatggcagtcaacttgttttttttttgagaccgagtttcactcttgtcacccaggcttgagtgcagtggcacgacctcggctcactgtaacctctgcctcccgggttcaagcgattctcctgcctcagcctcccgaatagctgggattacaagcgtgcaccaccacgcccagctaatttttgtatttttagtagagatagcgtttcaccacgttggccaggctggtctcgaactcctgacctcaagtgattggcctgccttggcctcccaaagtgctggaattayaggcatgagccactgcgcctggtcttttttttttttttttttttttttgagacagagtctcactctgtcacccaggctaccgatcagtggtgcgatctgggctcactgcaacctccacctcccaggcttaagcaattctcctgcttctgactcccgagtagctgggattacaggtgcgcgcctccatgcttggctaatttttgatttttaattttttttatttttttaagacagagtcttacactgtcacccaggctgcagtgcagtagcccaatcttggctcactgcaacctctgcctcctgggttcaagcaattctcctgcctcggcctcctgagtaactgggattacaggtgcctgccaccatgcccagctaatttttgtatttttagtagagacggggtttcaccatgttggccaggctggtcttgaactcctgaccttgtggttcgcccgcctcggcgtcccaaagtgctgggatcacaagtgtgaaccattgtgcctggcctaattttaawttttttttagtagagacagggtttcaccatgttggccaggctggtctcgaactcctggcctcaaatagtccacccgtcttggcctcccaaagtgctgggattacaggtgtgagccactgtgcctggcccaatttcttattttataggagaggtcagattgaaaaattgtgtctaatcccacacatgggggtgggggtggaggattgaagagttctagggacctttgtagatgggtgctgtccatggggaaatattatacaaggaacaggtaacggaaatgcagagcagggaggcccagtggagagatcccaggaagacttctcagaggaggtggcaatgatgatggactaagaacgcataataatgtctggggacactccttatgtgattctttttagccacagtaagtcaccatgttgcttatgtgtccccagccccaaacgcccactcccctcactgccaccccagctcccagagcagcaagtgtaatcatgggggcaggggagagtatcttcctttgtcttacagctggagggggccttgtacacccactcctaatatcacagtaggtgtacaatgagaggtcattgagagcagcctccccttcaacaccagccaccctcctgatttaaggtttgagcactttctcctgactccataagaatgacagctaacacttattgagcaccaggttctattcgaagtactttataaatagtatctcatttaaacttcaaaacaactctgagaggctgggtgtgatggctcatgcccataatccccagcactttgggaggccaaggcaggcggatcacctgaggccaggagttcgagaccagcctggccaacatggtgaaaccctgtctctactaaaaatacaaaaattagccggcatggtgtcaggtgcctgtaatcccagctactcaggaggctgaggcaggataattgcttgagcctgggagacagaggctgcagtgagccgaggtcgcaccactgcactccagcctgggcaacagagtgagactctgtctcaaaacaaaacaaaacaaaactctgagaaaggcactaatatcatcactattttttaattgagttagcctgggcttctctgacttcagggcctgtgcatctgacccctcttctgtgagccctctgcttttctgctttttccccagtccctgcttcattggagatcctggccttttcctctcctctggccccctctctacactaacagggacacatcaggctcacacctggacatctaaccagggtgaaggaggggctctttggggtacccactcacagatttctgggacattttcttatcctttaaaacagtcctataagctaggattgaaatgatttcactgtcatcccatagaaaaggaaacagactcaaagatgtgatgtgacttgttcaatatccagaggtgactcttgagtctagtgctgccctgactacgccacactccctcttctccagccaggcacttcttccttcttgggagtcaggcatgagtcagttgcccccttcaatgagacagaagagagggctgtgtcatagaagctttgagcacagtgtctgcttctgactcccagagtgcaagcctcagctgtcctgctgtttagaccagctccacctgtagggcccctggaactgaccagcaggatgagaggtgaaggaagagggtgatggtggctgaatcagtggccgcagcaagaacctgccccagcccaggacggcaggcagggttggggaggaagatgactttggtattggaacagagagagtggcaagagtttgatctttgactctttagtcagagggtgctggtccaatcgtagctagattggagtcctcacccagggctggcagcttttacggagagcactgcagccccatgtagcaagacacagggaggcccttccttgggctgctagcctgacacacaggaatcaatcccccagaagcaatcccacaggagcgagaagctgtgtgcctccagacgttccctgcaatgttaccaatgcaaaataactaccaaaaaaaaaaaaaaaaaagcagctaaatatccaatgagagatatcctgatatcctggcaactcactctggaatctgacggtgtagtgaacagcatggaaaaagttggtggaatgaagtggagtctacatcacacagtgtcccctgaaggatgactcacaggaacaatttctcttggtcccagtgccaggaaactctgtgtttctccggggcagttgctttgcttttatcttttgggttctacatgtctgttagctgaccatgtttcccttttagctctggctatcaggaaactccacatcgaatttctggctcatttctcacaactatatggcaggaactttgtataccaatactgcttgtggccttattttcatttccttctcccaaatagcctccaattttttttttttttttgagacagggtcttgctctgtcacccaggctggagtgcagtggcacaatcatagttcactgcagcttcaaatgcacctggtttatttattttttatttttttgtaaagtcagggtctcactttgttacccaaggtggtctcgaacttctggcctcaagtgatccccccatcttagcctcctgaagtgctgggattacaggcccaaatatccttctattaattaagaatcctgttgtattgtactctgtgtttgtaaactactgccattttttttttctttaatggagtgggatagagaggagaaagaagaagaaagagaaagttaagcgggctgggcactgtggctcacctgtaactggtacaggtatactggttagacatatcccaagtaagtgattgataaaaacaggaaaacgcaaaataaagcaatgagattcacttttcacccagaaagttggcaaaaatttgttctgacaataccatgatttggcatgtatgacattctatgctgctcctgaggtctacactgattgattagaaatgtggcgcacagtcaggcatgggggctcatgactgtaatcccagcacttctggaggctaaggtgggaggatcacctgggcccaggaattcgagccagcctgggcaaaatagtgaaactccatctctacaaaaaaaactacacaaattagttgggcatggtagctcatgcctgtaatcctagctggctaagacaggaggatcacttgaaccyggggggctaaggctgccgtgagccgtgattgtgacactgcactccagcctgggtgacagagtgagaccctcaaagaaaaagtaaatacataaaaaatgtgtcacagatgaaggtgcacatagctatgactcagcaattaacacaccaaagtatctgaactctagaggaactcttagacatatgcacagaagactttacagaaaatgtttgtttcagcattgtttgcaatagcaaatagaagaaaacattcttttcttcttttttcttttttggtagagacaggtaggccattttttggtagagacaggcagccatgctgccctgcctggttttgaactcctgggctcaagcgatccacccaccttggcctcctaaagtgctgaaattataggtgtgagccaccaggcccagccaaaagaaggaaacattctaaatgctctcaacaagagaatgacaaataaattgtgttctaaccttacaacagaatactatacagcaattaaaatgaatgaatcagggctacgtgtgcttttatgaacaaagctcaaaaaatagtattaaacaaacagcaaactgcagaaggctatttaagcttaattccatttctacaaggcttaaaattgtaataaccttattacataaggatcacttgagcccagaaggtcgaaactgcagcaagctatggttgagccactgcatcccagcctgggcaacagagtgagaccctgtgtctaaaaaagaaaaatgatgtgaacagtcattgcagctgtgtgggaaccttctgtctgcaaagatgggaaggaaatgtgtgaaagattatggtgtcgtaaggtaggaacaccaatgtcctagttgttcggtagaggatgggaaggagttrgtcagctgtgtctcttgcaggcttcgtggtccagggctccaatggcgagtttcctttcctgaccagcagtgagcgcctcgaggtggtgagccgtgtgcgccaggccatgcccaagaacaggctcctgctagctggctccggatgcgagtgtgagccagaatgccctgggccctgsgggtgggtggatgtgcaggatccaggctcctaggccctagcttgggtcctgtctccttgttctgcctcttytgggacatgctgaggcaccttcgcttggcccagtgtcctggtccaggcctccttctgcctgctctcacctctctccttcctctggcagccactcaagccacagtggagatgaccgtcagcatggcccaggtcggggctgacgcggccatggtggtgaccccttgctactatcgtggccgcatgagcagtgcggccctcattcaccactacaccaaggtgtgtgtgaggcctgagaccaagaggaggctctgcccagggagaggagataagggaagctgggaatagggtggtgcttcacatgaacggcagctataggaaacgggtggactgccaccatggatcagctgcacgacattgggaggcttacctgaccactctgtgttactgctttctcccctctaaaattggaggaatgatgtcatctgtctcatagggttgcagtgagcattaaatgagatcaggaacataaaggccttagaactgtgcgtggcatatggaaagcactccataaatatgacccactgtgattgcttacactcggggcacgtagcatgggagggaggcctgtccaggtggccctgtagtgaagcaggctgggacctgtgggtgggcaagtctctggctcttgggacctggggcggctgccctytcctgyttttctctgcgcccccctccccaggttgctgatctctctccaatccctgtggtgctgtacagtgtcccagccaacacagggctggacctgcctgtggatgcagtggtcacgctttcccagcacccgaatattgtgggcatgaaggacagcggtggtgatgtgagtggcagcagctccggggctggggtcctctcctccttttctgggtcctagcacttttgctcctgagggcagctctgagatctgtttccaaccttggcttctgtgtggattctctctgtcgtgcggrctctctgggactttcttgagggcatctctttgagcacygggctttcattccaccacacttacccggccctcatccaggatgaggctctgggcacagctctcacaccacatttgctgttgcaggtgaccaggattgggctgattgttcacaagaccaggaagcaggattttcaggtgttggctggatcggctggctttctgatggccagctatgccttgggtaggccgcccactgctctcaaattgtcatgggtgaccaagagatacccaggtacctgggtcttccrggagagatcgtgagggctggggctgggtctgcagatggtagtttgccagcctgcccactctgaaaactcagaaacctggccacgccgcttacctgtctgaattcgggatgctgtgagtaaccttgttggctgaaggaggatggccgtgtacaatccctggcctgtagtagggatgcctgcagtttgttctgagtcctgagctccatgattagatgacaaacttagctgctctaatcccaccttgtacatcattctctgagggcagaggccctggggccctcctctgtagttcaggagtccattttcctctcccctgtcccagaccagaatgaattgtcagatctacagagttgagccagggatcttcagttgcctgatcagattctgttccaatccaggatccctaggaatgtcacttagatcaactgctcttgtctgtttggggtcagggtccttgggtttggattagatttgagccctggagggaagggagaagaagggaagctgttcccttcagctgaagccccagtgagtagagatttgagkgacttttccagcactgcaggggagaatgcttgttcctattccatctggtccctccagactttggctggttgtctaggcctttgtacatctcccctgccatgtcatggcctctacggtgaaggggaagaagaagggatccatttctccctcattcctggaagtggagtagattaaaaataaaaaaaaaagcacaggctctggaggctggggggaatctcagctctgcagtttattcactgagtaatgctgggcaaagcaytcacctctctgggcctgagtttctactctgtgtacagagggatcatgaggattagagagcatcagggccatgctgctgtagcgcgcctgggacacatagtaggtattccacaaacaacagctctattagctcattctgaattgcctactctctctacggttttgaggccactgtrcctagggttccactcctatctarccttagaagcatacttacaggcttgcagaagtggcgggggtttctgagatcacagccaaacccattttcattgccccgatgggcacaaagaggactagagagggtctcattcaggtttatgcagtcaatgggaagacatgcctggtgacctgactctgtccagagtgctttccatgcccactgctgtctctggttgcatccactggggggaataaaatttcaaaagagcaaaggcttcccatccgtcctaccctcttacaggactgatgagtcagggggctattggaggaagctggaggtgtcaactgtcagatgggattttattccgggaggggttcagggaaggaaccgtccttgagttcactttcaggctctgctccctgcccctcacagatcagccctgagcagtgcttgacctgcgggattctattttgaatatgcaggcagctcttctctctggaaatgtatactctggactcacagagcatgcctttgatgtagccagccaagtgacatagaaatctgtatctaatgtccccaggctgaagaggtgctgggaccagggcttgggatgcctggaggggagaggctctggctgatgttctgcgtcttacttcgtgcaggagctgtkgggggcgtctgcgccctggccaatgtcctgggggctcaggtgtgccagctggagcgactgtgctgcacrgggcaatgggaagatgcccagaaactgcagcaccgcctcattgagccaaacgctgcggtgagccagtggcagcgggggcgcggcctggcggggggtgggcagtctgtgtcctcattggagcaggacccagggctggcaccaggccccactcagtctcttcctttcagaaaatcctttgagagaacatcccagtgtgggaactccttgtgactcccagaaaatcctgacttcggacaaagtcgagcaccactgattgtcaaacttaagtgtgcattaaaatttccytrggggcgaattaaagttccaacttttgggcccaagaagatgcattgaaacaaacatcctgtgtgattgtgacagagtaaccctaggaccacacttagagatgcctggagagaaagagtgtaaaccaggggmctctaaatccgtgctatcgggggccaggtcctgaaaaaataggaatgactggggctggcaaaggagttagaaggcaggagagtgttgtcttcaaataatcggttctgtgstcagactgtataccccaattctttgttgggcaagcaaaggagaacttcagagagaacgcccatcaagttcagggtcattctgaagtctgaggcaacagaaaaatatgtgcccctgtattcaagttttaatgtacattttatcctttctttccttcgttcctttgttccttccttcctccctccctccctcctttctgtctttctttctctttctctctttctttctttccttctttctttttttagacagagtcttgctcttttgcccaggctggagtgcagcaatctcagctcagtgcaacctctgcctcccaggttcaagcaattcttgtgcctcacactcctgaataacagagattacacgtgtgcaccaccatgcccagctaatttttgtttttgttttcatttttcagtagagatggggtttcaccatattggctatgctggtctcaaattcctggcctcaagtgatctgcccacctcagcctcccaaagtgctgggattacaggcgtaagccacagtgcccggcctattcttttttcttttcttttcttttttgagacatagtctcactctgtttcccaggctggagtgcagtggcacaatcttggcccactgcaacctccgcctccctggtgcgagcaattctcctgtctcagcttccctagtagctgggattacaggcacgtgccaccatacccggataatttttttgtatttttagtagagacggggtttcaccatgttggccaggctggcctcaaactcctaacctcaagtgatcctcctgcctcggcctcccaatcttttttcttttattttttttattttcgaaacagggtcattctctgtcacccaggctagagtacagtggtgtgatgacagctcactgcaacctcaatgtcctgggcttaagcaatctttttaattttttatttttatttttgtagagatgggggtctcactatgttgcctaggctggtctttatctcctgggctcaagcagtcctcccacctcagcctcccaaaatgctgagattacaggcatgagccaccatgactggcctactgtatattttatatttaactttttattttattttattttatttatttattttgagatggagtttcactctgtgcccaggctggagtgcagtggcacaatattggctcactgcaacctctgcccccgggttcaagcaattctcctgcctcagcctcccaagtagctgggattacagatgcctgccaccacacccggctaatttttgtgcttttagtgaagacgggtttcaccatgttggccaggctggcctcgaactcctgacctcatgatccacccgcctcgacctcccaaagtgctgggattacaggcatgagccactgcgcctggccaaactttttatttttagataattatagattcccatgcaactttaagaactaatacaaagggatcccatgtacccatgagccagttttccccaatggcaacatcttacaaaactgtagaataatttcatagtctggatattgaccttgatacagtcaagacacagaatatttctgtccctacaaggatccctcatgtcatcctcttatagccatgcctactcacatttgccttcacaggctccttaacctctagcaaccacacatacattcaccattttataattttgtcagttcaagagtatactatatggaatcacatggtatataacttttggggattggcttttttccactcagcataattctctggatattcatccaggttgtttgttgcatgtatcaatagttaattcctttttatttctgagtaggataccatggtattgccgtaccacagcatgtttatttattatttatttattgagacagggtcttgccctgtcaccggggatgagtgcagtggcaggatcattgctcattgcagcctcaaccccctggctcaagcaatcctcccagcttatcctcccaagtagctgggacaacaggtgcacaccaacacacctggctaattcttttttatttttagtagagacaaggtctcgctatgttgcccaggctggtctcaaactcctggtctcaagccatctttcctcagcctcccaaagtgctgggattacaggcatgagccaccacggctggccccccacagtatgtttaaccattcacctgttgaagaacagctgggttatcttcagtttttggctattaaaagctgccatgggaagggagcagtggctcacacctgtaatcccagcactttgggaggccgaggcgggcagatcacctgaggtcaggagtttgagaccagcctggccaacatggtgaaactccgtctctactaaaaatacaaaaattagctgggcatggtggtgcacatctgtaatcccagctgctcgagtggctgagcaagagaatcgcttgaatgcggcaggtggaggttgcagcgagccaagattgtgccactgcactccagcctgggtgacagagtgagactccgtctcaataaataaataaataaaagctgccatgaacattcatgaacaggttttcgtgtgtccataagttttcatttttctgggatcgatacacagcagtacaaatggtgggtcatagggtagtggtatgtttcattttctgagaaactgctggctgggtgtggtggctcacgcctgtaaccccatcattttgggaggctgaggggggtcgaatgcttgagcccaggagttcaagaccagcctgcgcaacatggggagactgtctctacaaaaaatatagaaaattagatagatgcggtggcatgcacctgtggtcccacgacttgggaggctgaggcagaagggaagatcccttgaatctgggaggttgaggctgcagtgagctgtgattttgccactgcactccagcctgggctacagagtgagatcctgtctcaaaaaaaaaaaacaaaaaaccaaaacaaacaaaaamcaaacccgaaacaaacaaacaaaaacccagaaacaaacctgctaaacctttccagagcagctgtactattttaaatttacactgatgtaaacgtatgagtgatctagtttttctgcagctttgccagcatttgttgtgactattttttattttagccattctgatagatgtatagtacagatgtatggtacaaattaaaaccgtctcattgtggttttaatttgcatttctctgatggctaatgctattgaacrtttttttcatgtatttatttgctatctgtatatccttttcagtcaactatctatatttcttacgcattttgaaattggattgttcttttgactgttgaattttagttctttatagcttctaaatactagtcctttgttagatatgtggcttgtaaatatcttttcccagtctacagcttgtcgtttcattaccttaataggtcttttgcagagcaagttttacattttgatgaagtacaatttatcaacattttcttttacggatcatgcttttggtgtcaagtctaataactcttaaagagttctgggcatggtggctcacgcctataatcccagcactttgggaggccgaggtgggtggatcacgaggtcaggagttcaagacctgcctggtcgagatggtgaaaccccgtctctactaaaaatmcaaaaaaaaaaaaaaaaaaaaaaattagctgcgggtagtggcaggtgcctgtaatcccagctcctcaggaagctgaggcaggagaatcgcttgaactcggagggcagaggttgcagtgagccgagatcatgccattgcactccagcctgggagacagtgagactccatctcagggaaaaaaaaaaaaatcttgaagagttcttagaagatcgtaaagattttctcttatttttttcttttaagttttatagctttatgttttataagtctgtgactcattttgagttaatttttrtataaagtgtaagacttaggtcaaggttttgtgttttttttccctaatggatattcacttgctgtagcatcttttgctgaaaaggccatctttcctccattgaactgcttgcgtgcctttgtcaaaaatcagtggggcatatttgtgtgggtctatttctgggttctctattctttccattgatgtatatgtctatctctctgcaataccacacagacttgactactgtagctaagtcttcaaatcaggtagactgattcctcccactttgttctttttttattccttcaaaattgttttagtctaatttctttaactttccatataaattttacaagaatcttgtttatatctacaataaaatcttgctgggcctttgatcgaaattgcgttaagcctgcataccaatctggggacaactgacttctttactatattgtcctccagtccttgaacatggtacatttctctgtttatttagatcttctttgatttatttcttcagcattttgtagtttccagccaacaagtcctgtacatatttttaaaaactracacctaaggatctggtgcagagtggctcacgcctrtaatcttagcatttttggagatagagacggcagtattgcttgaggccaggagtttgagacccacctgggcaacatggccagaccccatctcttaaaaaaaaaaaaaaaaaaaagacacctctgcactaggatctgtactaggcatctatggacatcctgctgcctggagggtagaagagccccctggctgctccctacacactgcctccactgcattgcctgtgtgtctggcagcaggtggggtgggctctggtggccttttgaagatgagcagtggtgcaagtcctgacttccctccccctggcctgctctgacaccacccagctgggagcgggggtggcagttcagactccttcactcagtctttgctggcctggctggttttcggctggagtagagcagttactgtctgaaagctttccatcttgctaggcaaccccttttctggtcctctggctagagagaactggcttctgttagtgcgtgtattgtctgtacccattggcactgcgtgcttgctgacttcttcagctccaagtctgggccagggtacgtagcactgtgttacttcttgggtctctaggtcccttgttggtcttccttctctctgccttccagagtcttcttatgtcttttatataatgtccagatatatatataattttttatataatgtccagataatatttttatgtaacgtccagagcttttagttgtacttattgggaagaattgggacaagtacatctactccatcttcctgaaagtaaatgctctaagtatttttctaaatggtgatttttttccccctaagaacattaaagtgggtgaaaaaatattgaaaattgagaagtaggtatgttaaaactcacagcactattttaggcttaaatatttcatataccaaaaacatgatttattataattttattttcctggctttaatggaagcaaactcatcaaaacatatttttccaagtctacttctagagaaagaataaccgctaaaaagacaccagcagggcacagtggctcacacctgtaatcccagcaatttgggaggctgaggcaggaagatcatttgagctcaggagtttgagcccagcctgggcaatagagtgagattttgtctttagtaaaaataaatgaaaattagccaggtatgagggtgtgcaactctagccccagctactcagaggctgaggcagggagattgcttgagcccgtgaggtcgaggctgcagtgagctacgatcatgccacttcactccagcctggacaaaagagcaagaccctgtctcaaaaaaagaaatttaaaaaatacaataaataaaaatgaaaaaatacaccaaaaaatacatggggcacacatgattacttatgcatgagccttctatatggtggggcacagctctgttggatcctgtctttatttaaagtttcattcattgtggatattttttgcattaattttgatttttaaaaaatattgcattgaaatattacttattttggctgggcacggtggctcacgcctgtaatcccagcactttgggaggccgaggcaggcagatcgcctgaggtcaggagttcgagatcagcctggccaacatggtgaaaccctctctctattaaaaatacaaaaattagccaggcatggtgttggtcacctgtaatcccagctactcaggagactgaggcaggagaaatcactcgaactcaggaggcggaagttgcagtgagccgagatcgtaccactgcactccagcctgggcgacagagtgggactgtttcaaaaaaaaaaaaattgcattgaaatattacttattttgatgattgagatttttggcctccccttaagttttgcatgcaaggtaagggcctcatgggcctggctgcagtcccaggctgagctaggcactccacaatattttgtttgggtaaagtgatgggtgggctctaragctccctcacagctgtatccttacctcaaaggggcagattaacttagatttacagaaacgacagctgaggaggtaaatctgagtccctctggaggtgaaggtgcttctgagatgggaccttctataaataggttataagaacttgcagaaacgagggccccgttgggcacaggccgtcctgcacatactgaacattccactggggtggggcctctgctctcccactcccagtgcacctctgaaaacgaaggtcccagaacccgcatgccaccgggacaggaaacggagcggcttccagggctcatgggaactggtctaatattagcagtgtttttctcatctggcccttgggacgtctctatggggtaggtgttgttatcactcatttcacagatgaagcagcttgggctgcccctggggaagagtggatgcctagctgtcatcccagatctctgcgtgtcatcccgccctaccccatcctgcctcacccttcattctgtgtcctctcctgtgccagctctgggcacatacccaggaatgcctggaacacctttctgctgcctaggctgtaggctcagacaccccgagaacagcttgatgtcactctattgcccatccctggtcaaacacaatgtccttcctccaccttcccaccagcctgcctcctgcccctggctatatttaggactttctacagtctttgccaccaaccccttcttagggtttgaagaggggccacatcagatatctttggaaacccatggcaggagtgagcttttctctgggcacctcttatttccatcctgtatcctgggtctttcccacctactcaggctttgggtaaaaaggccaggctattagaacatcatgggggtggcgaggcctgcaggagggtggcttaccacccattccragaaaaaaaatccatgcttgataaagcctccgggactctagtggtaaagttattagtcaatctttcatcagtggttcctggcctttttatcccaaacaaccttttatttttatcctcctaaggttttagcttctctccaaataaaactttcttaaggactacttttgtagtttttaggtagtgaaagattcatctaatatttctgatcagcatgaaataaccagttgctataccaaaagcaaggaaatttgatgcttcatttattctgtaatattccatacacgattttaaattataataggccaggcgccgtggctcatgcctgtaatcccaggactttgggaggccaaggtgggcagatcacttgagctcaggagtttgtgactagcctgagcaacatagcaagacctcgtctctacaaaaaatgcaaaaattagccaggcatgctgtcatgcacctgaagtccaaggtgctgtggaggctgaggtgggagaatcgattgagcccaggaggtctaggctacagtgagccatgatcataccactgcactctagcctgagtggcacagtgagaccctgtctcaaaaacataaacataaaataaaaataaataaattattacgggtgcagtggctcatgcctgtaatcctagcactttgggaggccgaggcgggcagatcacttgaggtcaggagtttgagaccagcctggccaacatggcgaagccctgtctctactaaaaatacaaaaataaaataaaataaaacgagcttggtgtggtggcaggtgcctgtaatctcagctactcaggaggctgaggcaggagaatcacttgaacccaggaggcagagattgcaatgagctgagatcaggacactgcactccagcctgggtgacagagcaagactgtctcaaaaaaawaaataaataaaaataaatgaataaattataacaatagctttaggtcccccattatcagggaaaagcctttagagatcatgttgtccagccccttccttttttagacaggagaacttactcagagataataagtaaatgacatacagtttatacaacaaaacttccttgggaaatgatgctttgcttttcctgggagaccatttagtgttagggtcaggaggagctatggggaggtgagggcagccasatgcaaggggagtagaggtctgggctgtgcctgagactctcacagatccttccccttcctgacttcccaggtctggtgtgacctgcgtcaggtttcagggagctgggctgcagactgctgatgctctagtgcctagacctgcagccttgctgtcttctcccaccccagcttgaggaccaaataccactctcctctctgttggagtggatttttctcctaaaaccaaaggaggcactcttcttccccaatctgaagtttttgtattttgctattacagacctgctctctggtctctaaatctggattcccaatgtaccctgggtgccatagagttggcrgttactttcctkggggaagagggtaggacttcaatgttctgaaagtgacagatctccgagttccagatatgggtgttcagcaaatttctcagtctcttctaacaggccctgctttgcaggtgacccggcgctttgggatcccagggctgaagaaaatcatggactggtttggctactatggaggcccctgccgcgcmcccttgcaggagctgagccccgctgaggaggaggcactgcgcatggatttcaccagcaacggctggctctgagggcaggcagggtccatggctggcctgagcccatctcagcctcctgccttgcacytgcagcctgaagcggagagcacagggggatgagggtggcaggyagcggggagccgatagaggctcctttgcctgctgtggtcctccaggcagcctttcacaggcacgcccatgcatatctcctattctaacggcccctgacctctcccttttggatcctaaactgtgtctctggtctgaagactgggaaggagcaatttctcaatttatctttctactgtggatgctttcctacgccctgaggcacatgaagtcagamaggaagggcagaggggcaagtaggcacagtaagggaatttttttttctttttttttttttttgagacagagtttcactctgtcacccaggctggagtgcaatggcatgatctcgcctcctgggttcaagcgattctcctgcctcagcctcccgagtagctgggattacaggcgcctgccaccacrcccagctaatttttgtatttttagcagagatggggtttcaccgtgttggccaggctggtcttgaactcctgacctcaggtgatccaactgcctcggcctcccaaagtgctgggattacagctgtgagccactgcacccggccgggaatttatcaaaggggggactacttagatttggggcttcaaacctgagtctagcacaatgcagctggaggccagggctactcctacaaacccaagttctgactccttccagggaagtatcagcttaagaaacttgatcaggaaagtgacactggtctttcaaagagccctctttaccctcccatccctgccctccacactgcaagctgcattccagccacaacgcccttttctaaatctattttcattcatctcctattctggtctgtagccttgattccaaccattgaatgcacggagacagcccagtggcttgtcagattggtaaataatgacacctggtggataaatgttacattctagaagactattctggtcagcctaggtctgaaacactaaggagacttggcctgagatagggccatccacttgcctacaggcactctgcttttattattaaaaatagtcactttgttactataataaaatttaacagaaaaaattagtgtggctatataaagatggacactctattgctatgcagatcttaggtttcctggccagatgtcaagaacctttctaaaggcaaaagagctctgatggtctgccttctcccagctcgaagagtgtccccagcaatactgagccaacaggcattcacttactggagacctggggaaggggtaagaggcaaaagagagcaagtgagctatttagaaacaaacacttagcacttttattttatttttttgagacagagtcttgctctgtcattcaggctggtgtgcagtggcacgatctcggctcactacaacctctgcctcccagattcaagtgactcccctgcctcaccctcccgagtagctggaattacaggtgttcaccaccatgcccggctaatttttgtatttttagtagagacagcgtttcgccatgttggtcaggctggtctcgaactcctgacctcaggtgatcttcctgcctcggcctcccaaagtgctgggattataggcgtgagccactgcaccccttcagcatcctttttgattaaagtgctaagtgtttagggccaggcagcactttgggaggcggaggcaggaggatcacatgaggtcaagagtttgagaccagcctgatcaacacggcaaaaccccatgtctactaaaaatacaaaaattagccgggcgtggtggcacacgcctgtaatcccagctactcaggaggctgaggcacaagaatcgcttgaacgtgggaggtggaggttgcaatgggccgagatcgtgtcatggcactccagcctgtgccacaagagcaaaactccatctcaacaacaacaacaaaaaaggatgctttctccaaaatatttaacctttttcagtggtaatatttgactagtggcagaaaaatggagatacattgtaaaaaaattactccttaaaagaaagtgtaaggttaaaaagagaggtaaatagatacttgtttagggcagaggctaaaggagagaaaataaaagatctcaatcttcaacccaaaaccaggctctgaatggcactacagcttggggcttagtgcctggggtcctctcacaggcaacttccagaggagcaaggctcagaggagaatcaagtttaggacttgggggaaaagttagggctaggcaggcagggtagtgcactgggtaagagctcagcctctgggcttaaacaggtctgggtttaagttctgggatctgccccttagtgtctatgggaccttggagaaactgcttaacttccctgagcctcatctgtaatacagggataataatagtaccttcctccaacaaggacgtgcatgtaaaagggttagcgtgggggtcaatgttccaccactctcctgttgcagaaaaagggaaactccggcaggagtggacctgccagaggtaacccagcaggtgtggccataactagtctcaggacttaagtactctgatgctcagggtgagagaggtccagtaaagggagctggaatcagaaaggctcggttacaaatctcacccagctgtgctacctactagttgggacagcctgagattgtctgatttaaataagaaaaaaaagttcatacgtcctcctctgtagaggctgagaaaattagatgacttgataaagtgtgcagggtcagttccaagggctaacccgattaacttttacaaacagcaaatgggttgatattcatgaagacgcagggccagaaagtcaggaaaactaggtataggcagttctggtgatttctttattctttataaacacctttttctacagtacaattcagagaataaatagaggcacrcggctataacttccaccacaatctgctgttgaagagacattcaatgtgaggctagggagctagaggtgggggacgtatttgggtaccagggtaacgggaggcctacgtaataaactgcagagatcccatcagtaaggtctgattgcggcctgacggtcaaggctcatgatagaagagctacagtgagccaaatgctcctttagttccccacagtcctagagtaggtccaattctaccaaaaccccaggggttcgggtgagtctgatttattggtccactgggaagaaactgtgtcagcccaagccatccgtatgaattcagttcactccatggtagtgcctgaagtggcctaaatattctacccttttccctggagttagtcacaaatacaagtaataagattactgtttacatgagtttttttcttgattgtcccaaaaagggatcctgttccccatctaaggaaggagagaggcacacatggggattatctgctctaagttgatgaaagaagacagcctgtcttctaaagggaggaggaaatagcactcttaccgaatccttcacggggacataggcaggaatgaataccagtctgatcagaccaagtggaagcctgcagccatgattccaaccagcatgaggagtaacatatggaaaagctctgccagccaggcacagtggctcacacctgcaatcctagcactttggcaggcccaggcaggaggatcacttgagcccaggattttgagatgagcctgagccacatagcaagaccctggctcaattttttataataataaaattaaaggctgagcgtggtggctcacgcctgtaatcccagcactttgggagaccaaggcgggtggatcacgaggtcaggagtttgagaccagcctggccaatatggtgaaaccccgtctctactaaaaaaaaatacaaaaattagctgggtgtggtggcgcgctcctgtagtcccagctactcaggaagctgaggcaggggaattgcttgaacctgggaggcagaagttgcagtgagctgagatcatgccactgcactctagcctgggcgagagtaaaactccatctcaaaaataaaaaataaaataataataataataataaaaaaattaaaaaagaaaagctctggccttgactttcacagggctgctgtactgagccacccctatcttttccctatttctccagagtggcacagagcactggccctaagctggggctaggatcacctgtccccaaagcagcagaacgaaggttctgtatcacttggcagaaaatgaagcagaagggtcacagcaggctacactgggtaacctgaggtcttaggaacagagtatcaaccagtgagaagaggtggctcctctgtcctccagcacataagggttagggaaagacagaaccaccaatgactgctgcagggtctgctggccagcatcctcagcacttttctgtggtccagttctggaatggcaggtgacagggcacatacaaggcctctgctccactgtcattgtcaactcatctcagctctgattcatttgttcacctcgaatcaacaacaggggcactggctttacccaatacttatcagctggtgcccactgcgctgtcaggcagtgagatttctggctgacttggaggcgctctgggcccgctgaacaatggcagaacacttctcacgycgcagcagcttgttgttctcaaagagaccttcattgcgggggattccatgagaaccatcrgggaaagtcagcaggcctttgaggagggcagagaaaatatgggagtgacaatggcattaatgtctcaaagatgagacatatctttggccttgatatgtccaggccaaagaagagaaaaactcccagctctactcaggagtactctattgatgagttcaatggataggtgtcagggacggccactatggattgctggacacccgcaggattaaaactaaacaggtatatttccacccatattatgcccacctaagtcagccatcctgctgggctgcaacttaccaaaaccatctactctgccatttttaaattccccctcaaaggtcatgttgtcatatcgaatgaagactccgacgccattaaacttgccctgggcaaactccccctcatacctgcagaaacaccaagaagttagccttcagtggaaagttagctgtccagatgaacggagtcgagcagctgctgatctctgttatttaatgatgctaaggagcaagccgattctaccagtcacatagctccrcctaccccacctattcccaaggagcagagagtatatatgacatgaagccctgatctcaaggaaagaagataggatgtgaatgggagtggggtggaaagtcactcacttggttgacatttcaaattttaggtccacttaaaaaatagctaataaaagaactacttattmctcatctgtgttctgcagggagtgagacaaggtcaggattgaccagatatttaccagagtcccatttttctgtcagaccctcccttatttaaggctaagaaaggaatgacctcatacccaccttgaaccatctgagaaggtcaataccccaaagccattaaagagcccattctcaaaatgacccaggtaggtgccaccatctgcaaacatcagttgaccaaaaccatgcctgcggcctgaacaaagagaagrataggtgtcaggttggaaggaggcagcttcagggtcccttcttactcttgtagcatcccttacctgccatcaccctacccacaaagaaaacaagagaagcagtgacattagcagggcagaggattattagccagagtcaggcactgggaaaacctggctcctggggccttcccatcttatcactacagattaaagcaggtctacccaagtatgaataagagagcacttaaaaataacaacagctgaccaggcgcggtagcttacacctgtaatcccagcattttgggaggctgagggtggatcacgaggtcaagagatcgagaccagcctggccaacatggtgaaaccccatctctactaaaaatacaaaaattagctgggtgtagtggcgcctgcctgtggtcccagctactcgggaggctgaggcaggagaatcacttgaacccgggaggcagaggtttcagtgagctgagatcgcgccactgcactccagcctgtcgacagagtgagactccgtctcaaaaaacaaacaaacaaacaaaaaaacaactggctgggcgcagtgactcacgcctgtaatcccagcactttgggaggccgaggaggcgggcagatcacctgaggtcaagagttcaagatcagcctggctaacatggtgaaaccccgtttctactaaaactacaaaaaattagccgggcatggtggtggcgcgctcctgtaacccagctactcaggaggctgaggcaggagaatcgcttgaacctgggaggtggaggttgcagtgggccgagatcatgccattgcactccagctcgggcaacaagagcaaaactccatctcaaaataaataaataaataaataaataacaattgctaacatgtgtatttatagtgcctttactatgtgccagcctctcttcttttttttttttttttttttttttgagacagagtctcactctgtcgcccaggctggagcacagtggtgcgatcttggctcactgtaacctccgcctcctggttttaaatgattctcctccctcagcctccccagtagctgggattacaaagtgttgggattacaggcatgagccactgtgcctgccctaaattcttgagccttgagagaaattgtacaggtgkgatgtgaccttggctcctccaatcccaggcatttcttcctggctttcaaatacctggtgtcccctttaatgcggactgttagaggagagacttcctgaggctctgctgggtgggctgtatccaccacaagaactcccttgaattctgtttgaaaggcatgattactcctgcaacatcttgctctgttttctggtcagttcagagagtaagcacagccctgttgttataatgaagctgaaaccagtgctgctaatcaggctgttagatttgcccagtagctttaaggtgctaaatggatactggttgtttttttttttttttttcctcagagaggcaatgtagttagattttgaggacaccgagtcaggctgcctgctgtgtttgccttcttgttctaccacttagagttctgtgatcttgagtaagttacttagcttctccttgcctcaatttccccatctgttaaatgggaataataatagtatgtgcctacctcataaggttgtcatgaggattaaataagatgataaatacaaaatgcttagaagagaggctggcatgggccgggcatggtggctgatgcctgtaatcccagcacttggggaggccgaggtgggcagatcacctgaggtcaggagttcgagaccagcctggccaacatggtgaaaccccgtctctactaaaaatacaaaaattagccagatgtggtggcaggcgcctgtaatcccagctacttgggaggctgaggcacgagaatcgcttgaacccagggggcagaggttgcagtgagctgagattgcaccactgcactccagcctaggcaacatagtgagcgagacctcatctcaaaaaacaaaacaaaacaaaacaaaaacagaagcaaaaaaaagaaagatataactcattcctggaggttgaattaacaatagcattttcaaattcctttatttaatcctaaaatggaataaaggaatggcaggcactatatggaattaaatcctggagttgaaaakgaagatccataaagttggctatatatcctgatgtatttgtcctccagcaaatgaagtgttcatcatggatactccccaggggtccttctcaccctccttccactcgccacgatattcctccccactggagtaggtgaaggaamcttttgtcagggtcatggtgacagattacaggataaaaggatgaaactgtaggaaataagcaaaggagaaccagtgtcatggaatggcgggaggaaaggactgcaaggcaattttatagatacattctaaaggccaccagcctggtaagtgtacactgccttaggtgcatttaaccaaaatacccctatctccaaccaccaccagcaccatcatctccacctctgcccaagtgctcttatcctcctgcttatcttaaaagttttcagccagttcctattttctatgacctgggatggaaatctacaaatattaatctacaaatatttatttgatacctactatgtgctcagtcgatgtataaaatacagtatcttcccttgacgagtttataatctagttaataagactaacaatttaaacactgaattatgccagagataatgtgattaagtgccaacttggatggcagagattaacaaagacatgagatggccagaatttaaaacaagcagacaagcagtggagaaggcaaagagcaattccagaatcagaaaacatagggaacaggccaggggcagtggctcacgcctgtaatcccaacactttgggaggccgaggtgggtgggatgacctgaggtcagttgtttgagaccagcctggccaacatggtgagaccccgtctctactaaaaatacaaaaattagctgggcgtggtggcaggagcctgtaatcctagctacttgggaggctgaggcgggagaatcacttaaacccgggaggcggaggttgtagtgagctgagatcacaccactgttactccagcctgggtgacggagcaagactctgtctcaaaaaaaaaaaaaaaaaaagaaaaaaaaaagaaaatatggggaaccaacactcaaagggcaaggaacactctaagggcaatgtgaacacgagatgttccatggcaaaataagaagcctggtctcattacagttgagggtttatttggggagtattaggaaataagcctgtgtaggtacatgtagccacaatcttaaatttgaagagaggcctggtgcagtgactcacacctgtaatcccagcactttgggaggccgaggtgggaggatcacttgagcccaggagttcaagaccagcctgggcaacatagcaagacctcatgtcaaaaatgtaaaattaaaaaacaaaaaataggccgggcgtggtagctcatgcctgtaatcccagaactttgtgaggccgaggtgggyggatcacgaggtcaggagttcgagaccagcttggccaacatggtaaaaccccatctctactaaaaatacaaaaattagccgggtgtggtggcgggcacctgtaatcccagctactcaggaggctgaggcaggagaattgcttgaacccaggaggcagaggttgcagtgagctgagatcacaccactgcactccagcctgggtgacagagcaagactctgtctcgagaaataaataaataaataaataaataaataaatctgaaaagaatctcatggatttagcccaacctctcattttataggagaaatagaagcccagagaggtaataaagtttgttgacagcctcccctgactatgctagtccttttttcctgtacagcacagcctctgcttttagctcaggctaacttaaagagacctttgaaagctgggcataagagtttacagcatatgagggaggaaaagaggcgacctctgcgggtttgtgaaccaggatgtaatatgaaggcagtgtgtaaggaaaatgaatgtggtagcacgaagtgggatgaattggagcagcaagtccatagtcagaaaagcttgcaaggaagggaaatatgataatgaagcaaattgtaaaaatgggcagagttattctccctccgttcatgaccctacaatgtgacaaggcagatcctcccattaagaggcagagttggccgggtgcggtggctcacgcctgtaatcccagcactctgggaggcggagtgggtggatcacctgaaccagaatggccagcatggagaaatcctgtctctactaaagatacaaaacattagcagggcgtggtggcgggtgcctgtaatcccagctactcgggagactgatgcagaagaactgcttgaactcgggaggcagaggttgcagtaagccaagatcgcaccactgcattccagcctgggcgacagagtgaggctctgtctaaaaaaaaaaagaggcagagtttatttattcctccacctgctggacctgggttggctgtgtgacttgttctagataatggaatgttcgcaaaggtgatctagcagaggtctgcaaagcacctgtgcactgggcttgccctcttgctacacttggacctgttctgcccccatgtaaatgagtccaatctagtctactggatggtgagaccctgtcccagctggccacagatgaacaaattgctcaggcaagactagaagaactgcccttctgagcccggccccaaactagcgaccacagactcacaggataaataaatggttattgtttcaagccactgtgttttctggtggtgtgttattacccagaaaaagctaactgatacgttcaggcatgagtctgggagatcacagtataatgggagcagaaggaacaactggggggatacatcataggaaaacaatcagtaacatttggggactggctagatatggcttcacattagtggtgaaaggatgtattgaaggatattctataagaagggaactgcacggtggctcaaacctacaatcccagcactttgggaggctgaggcttgcggaccacttgagctcaggagtttgagaccagcctgggcaayatggtgaaaccccatctgtaccaaaattacaaaaaatccaaaaattagccgggtgtggtggtgcgttcctgtagtcccagctacttgggaggctgaggtggaaggatcgcttgaacccaggaggcagaagtgcagtgagccaagatcacgccacgacactccagcctgggcgacagagggagaccctgtctcaaaaaaaaaaaaaaaaacggaagaagaagaagagggaattaagataccccccaaaatcattaaatataaacagaggcaaatagtacgtcatttgatagactaaaaaatacaagccctatttcttttttaattccctaggtctcttcattcatcccttcatctttcatttatttatttatttatttatttatttatttatttattttttagagacagggtcttgctctgtcacccaggctagagcacggtggcacgatcatagctcactgtaacctcaaactcctggattcaaggcatcccgtcacctcagtctcctgagtagctgggactacaggcgcacactaccacatctagctacctcctcatcttttccagatctaagcaatacaatgttttctccagtaattttgayaatgcagattcctaggcccaaactcagacttactgaatcagattctgtagtcagagcctgggaacctgcagttttaataagcacatcattagatccttacttcaaagcttgtggcctactgctacaataaatggaaatactgtgtgtgaaaagttctctgaactataaatcactattgaaaagtcctctatcaaccaagcatggtggctcatgcctgtaattccagcactttgggaggctgagcagggacaattgcttgagcccaggagtctgaggctgcagtaagtcatgacagtgccactacagcctgggtgacagagcgagaccctgtccccctccaaaaaaaaagtcccctctgattaataagtaacctagagtctgaccctcaggcatctgactgagttccaacaggacaaggacacattctcctcagagtactggggccagacctggtggagaaacaggaaagaattcttttttcttttagagacagggtctcattatgttacccaggctggacttgaactcctaggttcaagagatcctccaatcccctcttagacttctgagtagctggaactacaggtgcatgccactgctcccagctcaaaacaagacgggattctttttttttttttttctttttttgagacagagtctcactctgttgcccaggctggagtgcagtggcatgatctcggctgactgcaagctctgcctcccgggttcatgccattctcctgcctcagcctcccgagtagctgggactacaggtgcccaccacsacgccccactaactttttgtattttttagtagagatggagtttcaccgtgttagccaggatggtctcaatctcctgacctcgtgatccgcccgccttggcctcccaaagtgctgggattacaggcatgagccaccgtgcctggccgcaagatgggattcttaaatctcgggggcctggcgccaacagctagcttccttttccttcaagtcccagggaagccaaaacctcatccagtcaagatggagttccaaagagtgggttccatagtttcatagcacaaaaggggtctggtatattttatgcaaaagtgatgctttaaatgttcaactaaaacaacccatatgttaaatttgctttctccacattgtcatggtggacagtgctagattatttatatttcaattcaggtggcacaaccctctctaataatcaattgcactaaccccagagaagctgtctgaaatacctttataacagaagctaacatttactgacctcttactgtgttccatcagtgttgtttatttgttttgttttaagagatggggtctcactcagttacccagcctggaatgcagtagtgtgattgtgattagagctcactgcagtctcaaacttctgggctaaagtgatcctcccgcttcatcctctccagtagctgggactagaggtgtgtgccaacacacccagctacttttcaaattttttgttgagatgggtatcgctatggtgcctagactggtcccgaactcctggcctcaagtgattcttcctcatcagcttcccaagtagctgggattactggtgtgagcatcagtgttttttgttttgttttgtttttgagacggagtttcactgttattcttccccaggctggagtgcaatggcgcgatctttgctcactccaacctccgcytcagcctcccaagtagctgggattacaggcatgcgccaccacgcctggctaattttgtattttcagtagagatggggtttcaccatgttggtcaggtgacctcaggtgatcctgacctcaggtgatccacctgccgcggcctcccaaagtgctaagaatacaggcgtgagtcaccgcacacggcatgagcatcagtgtttttaaaatatattatctaatttcatctcacaacaactttttggggtgggtattattattatttccactttagggatgaggaaactaaggtgcagagaggataagtaaattaactaaggtcatacatgtggaaactaacacgtgaaagttagaatcagagctctgacagctggccttgctggcacaagttcttacagtaacttgctaacttataccatactatcctatctggcctcccaggataatatggtggtgttgtagactctgagcacaggaggacttgagttcaaatctgagttcactgtataattatgggcaaggtatttaagtatctctaaatctcagtctcctcatctgtaaagtggagataagatatgtatttcacatagttggcaggtggattaaattaaatatctgagagtcagtgggtgacagaaaagaaaaataaaagaaagaaaatgacacacacgtaagtacctagaacactgctagggcctgtccactaaatgttagtttctttcctctttcaaagttttacacttaaactcacacatatacttactgtaatgaaaacttctctaggtctttcctcagtaaaaactgctaccaatgtaattcaaacaacactttgaaaaagaaaatctcagcaattttgactaaagagctgaatactaagtagaggaaaaacaaactatagttgccacccatccactctttatcaacatcctacaggatatttttattttggcctcatgtcataacgattttttgttttttaaggagacagtgtgtcgctctgttgcccatgctggtgtgcaatcgcttgatcataactcactgcaaccctgaacttgtgggctcaagcaacccttctgccccagcctcccaagtagctaggactataggcacacaccaccatgcccaactaacttttttgtagagaccgtgtcccactatgttgcccaggctaatctcaaactcctagcctcaagcaatctctggccttggcctccgaaagtgctaggattataagcatgagccaccacacccagcctcatgccttttttttttttttttttaaagagaacaagcgggctgggcacagtggctcacgcctgtaatcccagcactttgggaggctaagatggatcacctgaggtcaggagttcgagaccagcctggccaacatggtgaagccctgtctttactaaaaacacaaaaattagccaggcgtggtggcacatgcctgtagtcccagctacttgagaggctgagacaggagaatcacttgaatctgggaggtggaggttgcagtgagccaagatcatgccactggtctccagcctgggtgacagagcgagactctgactcaaaaataataataataataatcataatcataatcataatcataatcataatatgttctgatgcttgttctctctctttttttttttttcttgaaacggagtcttgctctgtggcccagactggagtgcagtggtgcaatgtcggctcactgcaacctccacctcccgagttcaagtaattctcctgcctcagcctctcgaatagctgggatttcaggtgaccgtcaccatggctggctaatttttgtatttttagtagagacagggcttcaccatgttggtcaggctggtctcgaactcctgacctcaggtgagccacccatctcagccttccaaagtgctgggattacaggcatgagccactgtgcccagattttttttttttttttttttttagacagagtttcattcctgtggcccaggctggagtgcaatggtgcagtctcagctcactgtaacctctgcctcccaggttcaagcgattctcttgccccagcctcccaagtagctgggattacaggcccctgccaccacgcccagctaattttgtattttcagtagagacagggttttaccatgttggccaggctggtcttgaactcctgacctcaggtgatcctcccgccttggcctcccaaagtgctgggattacaggcatgagtcactgtgcccggcctgatttttgtttgtttgtttgtttaatggagactggtgctggtgactttgctgagtagcttcagcagagggacctgaacacctttttttttttgttttttgttttttgagacactctcactctgtcacccaggtggaagtgcagtggctcgatctcagctcactgcaaccttcgtctcctgggttcaagcaattctcgtgcttcagcctcctgagtagctggcattacaggtgtgtgccaccacgcctagctactttttgtatttttagcagagacagggtttcaccatgttggccaggctggtcttgaactcctggcctcatgtgatctgcccacctcggcctcccaaagtgctagattacaggcgtgagctaccgcgcccagccagaacataatgatttttgatacagacaccaaaagcccagaaatggtctaatgtgaaaacagctaggcctgaccagagcagggttcaatgacatcttctacgccctggctctgtcccagccatgaggacagacgagttataagaatccctgtgctctcacccaaataagagaaaagattcatttctcgcctaaatgaagggcaaccttgtggagactcttctagagatatttgggggccactcccataggactttctcccttcttcagttatcagtcaagcattccatttccagtatctctcacacagaagatatccgaggcaaggaccattatcttcttgtagtaaactccctccaaacctctgggagctattttctgagacgtgatgctggtacttgccatgtcatctctgtcctatcaatgtcccacaaggtcagcatccaatttcaggctcacaagcctcttatcaccagcccagcatcagagtgtgctggggtagaggccaacatgactccattgcaaatataacattaatgagagcatgagaagtagttttccatcagaatagcagaagaaaacgctttccagtacagacgggcattttgatcaggcaatcctcagctcttcccagaactaagttacagcactaaaagtcagcttatggttgaagtttcattccttcaaaacacatcagttagaatctgaagggctgtatcttccactaaatcttataattaaacaaccattccaaaacctaaacacaaaatcactatttatacaaaaagattataagagcatttcctttagatgtctggcagcagttaaccaacttgttttcactcaaaatttggaaggagttattgcagtgggatttgaggagtcatattgactacacagggactcagggaaagtactgccttgtatttatttactttttctcaaggctacgtgaaacttccaaagagtggcattctaccttgttccagaaggaacagtataagattgctgaaagaagggaacatttctccagtttgagggttatttacggacaaagtactagttttcaagtggtacacctaaccactttttttctttctttttttttttttgagacacagtctcactgtgtcacacaggctgaagtctaatggcatgatcttggctcactgcaacctccgcctcccaggctcaagagattctcgtgcctcagcctcctgagtagctgggattacaggcgtgccagcacggccagctaattttcatatttttagtagagatggggtttcactatgttggccaggctggtctcaaacttctggcctcatgtgatctgcctgccttggactcccaaagtgctgggattataggcatgagccaccacgcccagcccctaaccacttttttagtatgctgttagctcttggggattataccctaaatattttaaggaagccaatgaaactgaaaaggttaccttcttattaccaaatgtggcggactgtatttccaagatgtttgcaacagtatcttctgtcttacatgtttgtctacaatttgatctggccattgatccattaaaaggtgaaatctacctcccctcccttgaatctgagtaggcttgtgactgcttggaccaaaagaacacaatgaaaatgatggtgtgggccgggcgtggtggctcatgcctgtaatcctagcattttgggaggccgaggcggacggatcacctgaggtcggaagttcaagaccagcctgaccaacatggagaaaccccatctctactaaaaatacaaaattagctgggtgtggtggcccatgcctgtaatcccagctacttgggaggctgaggcaggagaattgcttaacccaggaggcggaggttgaagtgagccaagatcgcgccattgcactccagcctgggcaacaagagtgaaactctgtctcaaaagaaaatggtggtgtgttctgaggttagatcataaaaggtgatgcaacttccatcttgtcactgatacactcacacttggagacccgagccaccacataaaaagcctgactacacagaggctaacactgaaagccaagccacacagaaaagccatatattggtgttccagttggctgcccttacctttgaatcatcctatcccacgtaccaggcatcagtgaaggagccttcagatgattccagccctcagccattgagcctgcattccatcccatatcagggagcagagagaggcctccccatggtgccaggtccaaattccctcacccacagaatccatgagcatcatatgggtgttttttttttgtttgtttgttttgttttttgagacagagtctcgctttgtcacgctgggtggagtacagtggtgtgatctcggctcactgcaagctccgcctcccgggttcaagcaattctcctgccttagcttcctgagtagctgggactacaggtgctcgccaccacgcccagctaatttttttttttttttttttgagacggagtcttgctgtctcccaggctggagttcagtggcacgatctcagcttactgcaagctctgcctcccaggttctcgccattctcctgcctcagcctccccagtagctgggactacaggcgcccgccaccatgcccagctaatttttttttgtatttttagtggagacggggtttcaccatgttagccaggatggtctcgatctcctgaccttgtgatccgcctgcctcagcctcccgaagtgctgggattacaggcatgagccactgtgcccggccccggctaattttttgtatttttagtagagatgaggtttcactgtgttagccaggatggtcttgatctcctgatctcatgatccgccctcctcaacctcccaaagtgctgggattacaggcatgagccaccgcgcctggccacagtatgggtgttttaagctgctaaattctggggtactttgttatacagcaataataactggaataccatgtttcaacctaaccctcccaccatcctctcccattggttttcaacagtacatactacaaacttccattccattttgacttaggcacatatagcaaattcccttcagcaaatgcttgccaaaatgatgtccattgccaagaccacagtcagaagtgctaatgaaagggaatgtgtgtagaatccatgagtctcaggccatggttgaatacatttggctagaaactgtcacatgtgcccaaatagttgatattgtcactatttgggacagtgtctggattttatgacttttataattaaccatgctaatgaatagctttacagctactgacctaaaaaggaatttcaccagtaaccatggtcattgagacaaacctagtttaacaaagtatagtcagtgccgatgaagactgaaagcccaatacttttttttttttgaggcagtctggctctgtcatccaagctggagtgcagtggcgtcatctcagccactgcaacctctgcctcctgggcccaagccatcctcccaccttagcctcctgagtagctgggactacaggagcatgccacgacacccagctaatttttgcattttttggtagagacagggttttaccacgttgcccatgctggtcttgaactcctgggatcaagtgatctgcctgcttcagccttccaaagtgctaggattacaggtgggagccaccatgtctggcccaatactttaataagggatgcaaatcagtatttctatcagttatccaaatcatatttttaaagagaatatatggctcaggagtttaggctacagatacacccatggaatccagtcacaaaccaagatgattcacacttctaaacagacactcaccctttctgcactcctgatagatgggttgcaaaggatcagtccaaacatttacataaaagaaaattactattctgtccctgtaaaccaacacactattagtctgcactatataccatattcctggtatcttcattttcttttgtcccagacatttctttttaattattattattttcttatttccaaacagaactctgaggcaataacgagaatttttgtttccgttctttttatcgttttctaattttaagaaatcaacgtattaaacaacatttttgtattcacagtaaactgtgtccaatttaagaggattaaaaaaaaaaaaactgacataaagaggaaaaagggccaggcatgatggctcactcctgtaatcccagcacgttgggaggctgaagcaagaggatcgcttgagcccaggagttcaataccaagctgggaaacgtagtgagacctcatctctacaaaacaatacaaaaatttgctgggtgtggtggtgcatgcctgtagtcccagctactcaggaggctgaggtaggaggattgcttgagcccacaatttgaggctgccggggtgagcagtgactgcaccacacctgtactccagcctgggcaacagagccagaccttgtctcaaaaaaaagaaaagaaaagcaaaacaaaacaaaaggttggggcggtgggggagatccagttagagaatactgggtggaggcagccaccctaactacccacatgtccccccagaaccacccttcccagggtacaatagtcttgtcaaattatttcagtaataaagaaagcagttcataagcttttagaatcctaaagagaagaaaatgaaggctttgatgaacaaagattagccttgttaggaacctagaacaaaaagtcaaataatactccccttttttttttttttttttttttttgagacggagtcttgctctgtcccccatgctggagtgcagtggcaggatcttggctcactgcaaccgccgcctcccaggttcaagcaattctcctgcctcagcctcctgggtagttgggattacaggcacgtgccaccatgcttggctaatttttgtatttttagtagagacgaggtttcaccatcttggccaagctagttttgaactcctgacttcgtgatccacccgcctcggcctcccaaagtgttgggattacaggcgtgagccaccgcgcccggcctaaatatttttttttaagtgttttaaaaggagctcgaaataactgtttttcattataagtctaacctcctctttcctcatgtgaaaagtaaagaaatgtatcgttgctatatgaagggttcgtttagggaagactgtgggatggttagattgaagaaagtgggaagaaaatactggcgccaaaaagatttttttttttttttatttaaaggcgatgatgacctgggggtgattgggactagggagtaatactgccagaatactatcctatttcacgggaaagggaatgccagggctggactccgatatagcagttattcctgctggtacctaagcagttcagagatgctagaatgcagggataccacccatcaactaaatgaagcatcccattccccaggcttccatatgtgggagttctctccaccagtgagataaaggcgggctcagggaaaacaaagccctagaccacaacaaggcaacaccttctcgcaccccattttcaccttccaggcgcgttccttcctgcta

SEQ ID NO: 95256 - DNA, 138244 bp, Homo sapiens
ttttttagcttctatgaaactacactcctgggtctttttttttttttttttgagatggagtctcgctctgtcacccaggctggagtgcaatggtgcgatctcagcttactgcaacctctgcctcccaggttcaagcgattctcctgcctcagcctcctgagtagctgggactacaggcatacaccaccacgcccagctaatttttgtatttttagtagagacggggttttgccatgttggccaggatggtcttgatctcctgacctcgtgatccacccgcctcggcttcccgaagtgctgggattacagatgtgagccaccgtgcccggcagggtctttttataccttactgactcttgtatttgccagttcctccttttttttcttgacttcagatctgggctgcactttctagctctgttgtctaaagaaaaatatctgctgttactcaagatcttctgataggttctacatcgttgtytatatgttgtctacctggtctgcctctttgagcaccagagtttgacagcatagttgagtgctccatcttaacctttcataagactcagacttacctatcgtaagtcttgattttttaaatcaaacctgtttccctcaacctttccccattccactaactggtactaacttatacttacttgttcaaactaaaagacatgtaaatccttgactgtgttctctctcatgcccatgtctatatgcaagtcctgtgggctcttcgaagctgtgctttgcctcctctccattgttaccaccctaggcaggctacctttatttctcagttccttcataactgctccctcttgcccctactcattcgtctggctcttatcccatccatactccatacagtaggaaaggtaattgctttaggatttgaagagatgaggtgatttccttgttaagatctgtaatggcttcccattatatgaaattcttatgattagttggctcttgataccttttgtgactttttcatatttcccttgcttgccctgctctagccacagtggcctcatttctgtctcaagtccttttcacttgatatttctgctacttggttcactcttacctaatgttttgcttggctggatcctttctttgcattcagttctccagctggtctgtattccatctcttgtcacttcttactgagtcctattttattcatacttgttaacgctatttgaaattttgttgcatgtttttcagcttcattgatagtctccctttacctggaaaggtgactggtatgttgtgagtgctcaatagttgttgaaacaagtccctcaccaaatctttttaatctctcccagtaatccatgtcagaccaggaagactgttttccagttatctcatatgtagcaggccatcctccactgaagagtgagacatggcaggcatggcagacatggcaagacaaagctcttacctctccagtgaacccgtgtacagcttcagccggtgtgagactgaagttacccaggaagaatccagctttcacttgccttctcatccaattcatcccctggagtctcctctctaggtcctaatttccagtaggtcatggtatcccaagttcccacctaatattagtaatttacctttttatgaatcaattacttctctattttagtgtcatccagagttttcttccaggaagccaggattgagtgtggtcattcaattctcttcagaatatttttcatgtcagtaaagttcaacacattctttttaacgtctacaaaatagcatagatgcaccaaatagcatatagatgcaccataatttataacaaattatagattacattttttagtagttgctcaaattccatggaagtatttagctgccttttctttgagaccaaggttggggaaaaatggatgcaatttttcagaagggagcaacaacaagatgcattgaaaaagcagaccaatggaaaatatttctcaactagctaccttgcttatgctttacacctaggggattaacaacttaaaaagaggttcttattaggttactatatgttactgtgcatgtctgtctgctacactggggggttacccatgaaaacattgttaaagcaagaacattctcagataagagggggcctagcttttcattggttatctatttaatatagaaatgcttaattgcaagtgtgctatagtgtcacttagactgaggtgactagatcagtagagttctcggaggcatctaacaaatttacctttggaaacaaggcccaagtatgcgtctaaatgatagctaatgaacaataataatactttatagattgaatcactttaatgagagaatagaacatggtcaagtggaaggtaactgattttagtttaaggacgagtatggaaatgatataagtgccttacgttaggttttaatgttaacacgtgtgtcactttttaatctctcccagtaatccaatgagataggtaattgtctccgttgcatatatggaaaacctgaatttcagagaggtttaatggtttgtctaataagtttagcttccaagagatagtagggaatagtgtgtagtctaaggttatatattgttatatgattatatattgccaggttttaagcaatcgtctagcacttacaggcaaatctctcttagcctcagtttatctgtacagggagaaaagagttctcacagatttttttcaggaaaaatctcataaatatgaaataccaaatactttatggaaaggacttaattcacaggaagcacttaatattagcgagtattatatattgtatcagtgattcccaagctttaggattctgtggccaatagacttcaaaatgggggagaggagatggaatggtcggcttctagccaactgaggctattaaaaaagaaaaaataattatctaacgccacgatctttataaaacgacattttaaaattcaaattggtagtgaacaacgtagtctcagaatgaaggagtgttctttaaattgaataaatttagcttcataaaacactcagtataattcttattttttttttattttaccatgaactaggaattggatgttctattagtctccctccagttctaaaatattttgactctaatattcacaatttttcatagtcctccctgctcctacacttttctccatctgacctagaaatgctggctgacagtttgtagtctaagtggttatttacctaatgaacttgtgaataattgctcttagaaatcataggagtagagactatatcaaatgaaatttgactggataaaacagtaggcagtataagaaaagtagcaaagacagcaatatacactcattcatctaacaaatatttatagtctactaattgccaactactgtactagatcctacatatgatgaaccaaacacaaatgatctatgccctttggaccttaaaatttgttttactcctatctcccaggactggtaggttcttagaagcttcaagataaatattacatattcctagagctttaattttaattaaaggaggagtgagggtgggaggataattaggtaatttatttggcagtttaaaatttacattgaaaaacatcaatgaataggaatagcatgcaaaatttacatggcttaaaaaatacaacatgtaatactttaaaagcaattttactcttgtaagagtcagtttgggctatggctccagattggcatgcatagtttattttcctctgcttctcattggtggttctttacgtttagtttgcataaacattgtttgaagaaatattaaaattacagattccagggtcctagatactctgattgagtagggctgtgaggaagcccagaactgctttagaaaaagctcttgggtgattcccatgtagtggtctatagctctttctttgaggggacttgccttagggatacttcagaagtttcataaggcaataaatgtaaaaggaatcttcacaaaatgaaatataggaacatttctctgtgaaagaaactcattttttgcatactatccctgctgtctctcctaatgttgccaaattaacatacttttaaactgcagagattaatttgagattaatacattcaacaggtccattttagaaaaagtccttgagaaattcttgactgatacattgctaaaacattgctttaagaggctgccctaattctgatttttcaactaatttaggatatcacaatttaaaaacaaacaaacaaacatttatgtaatgaatggtatggaatctggtttggagttgtgtttacttctaaaaatagaatttcatgtattgcctttgtatcttctagagatatgaatgatctccagccagagaccaccagtaacacacctacaagtggacaaagttgtgtttattgacattgtaacaagggagaatgcttgccatgggcacctaatgtgaggtgtctcagtaagaggatgttagaaactacataggatttgggcctgtcgtaggtgatttggggaaagttcaaggaaggatctggactggatgatggtaggaactggtgatagtagtgcatcttaattcttatctaaaacataggaatggagtgaagctagaactgattggtaaagaagtcataatagctaggataggggctatttgaacaatattcatggttttctattatcagacatgattatgattatgtttttgttgattcattgtggtcacaatggccttggctgatgctgtgctgtgaaattgtatacgtttaaccagggaaaaccatggtccagttgtgagtttcaggccagctccaggctttcagggcctgcttttctctttttcaaggttaatataaaaaagaaaagtgctatagtatgtatgagtaagatctacacacatccgaaacattcaacagtggctgtgtgtggacaaggctgaaagctcaatgtagaggagtatacaaatattactattcctatttaaaacagctcagtaattactgtgtgaacttgacaataacattaacagcttccattttttaagtatctactgtatgccatgttatgtactaggtgccttgcatacattcaacagctttgcaaggtgaacatattttgatcatctccactttacaggtaagtagacagactattatttccagaactgccaagttacatttattaaatggaagagctggtatattaatgggttcagctcattttgagctcactgtatttcccctataccaggatgcctttctattcagaactttgatgtctaaagttacagcaatggagataaaatacattattggcaggattgttcagagactcaaatgctatcatacatctatatatgatgtatgaaagcacctagcacaataactggctcatggtagacaaatcataactaactgtactgttttcatagcagaggtgcctctaaacgtgagtacagataagttaactatattgagattgtggagtgactcgacgattttaacctcttggtcacagagaaatcaggctgaagcattttacctttatagaatcatagtattttgaagaaccaagaaattgtcaaggtcttcttttacagatgagaaaaatgaagctcggaaaagcagttaatttgcccagggtcacacatttaattattgcccgagcttggctaagaaaccaggtcttctgactcctaagcccttgccttcttcaggccacatagctgcttcttttcatgatgtgtagattagaaaagtcagtgtgccccggggcccttgattgcaccttggtttccctaacaaggatatgggatccctgctgacatttcagaccttaagttgcagagctctgcacttggatcttcttccttcttgttatataatcttacagttaaaagtttctaggaatatttttattacgtgcaattggcaacttcagtattttttaaagggtgttggtagcattatttccgggagctacttagcgctccggttcggtacctcgtggagaagacgggggaggggagcagcgagatttccttgcggagcaatattcctagggtacagacctcgtagcccgggcccgcgactccgccccgggagcgggcaggggcggggcgagcgctccagctggcgggaaggaggaagggccgggcgcggcgcagaggcgggcgcctaccagccggcagctccggagctgcycgcgccatgtccgcgcacaatcggggcaccgagctcggtaaggggcccgcggggctccccatcccctctccctcgcgttcagcgccgccgggactagcgcggggcctgctgccgcccagtgccctggctgtgggtccccgaggggttttcgctggggcgggaagcagtggcgtctggtcagccctcaccccaagtaaaggccgaacccggcacgttcgcgccgcttgtctttgcacctaagcttttactcttgtatgcggaaggagtaggaaagggttagattattatcttcctgccttttcgttcactctagctcgctggttggaaaacccaacaacccaaaaaacaaaacccaaaacaaacaacccccaagcaggtaaaaacagataaaaaccttctttctcctccttttaatagaatacttgtgtaatttaatgcagtatttccgtagataattttaaccgtaaccttgaagtggccgtgctcgtggaaaagttgtcagccgtctgtgctcaaaatgtaacactgcagattcatgggattttagagttacaaagatttgttaaagtacctgtattatttcccagttttcatctttttttatattgttcaaatactggcaagaaaccttagttcagatttcttttttttttttttttattgatcattcttgggtgtttctcgcagagggggatttggcagggtcataggacagtagtggagggaaggtcagctgataaacaagtgaacaaaggtctctggttttcctaggcagaggaccctgcggccttccgcagtgtttgtgtccctgggtacttaagattagggagtggtgatgactcttaacgagcatgctgccttcaagcatctgtttaacaaagcacatcttgcaccgcccttaatccatttaaccctgagtggacacagcacatgtttcagagagcacagggttggggataaggtcacagatcaacaggatcccaaggcagaagagaatttttcttcagatttcttaacatgtgaaaaatttataattcaaacagcaaaaccatgatcaagagaaggtttaagcgtctcgtttaagtattatagcttggatatctgtgtatccaggatctttaacttcttacctgtgtgacttcggacaaattaataactttgcgcttaagtttcttcatctgtaaaatggttattttagtggtagttaccttataaggccgttaggagattaaataggatacatgtaaagtagtttggtatattgtggacacctagtaagtcttcagtatagatagtattagtatatggagttatggttttaggggctaattttgagaaaattggctgtaaattatatgtaacacatacaggtaggtccttttcgccctccttaaaagtgactggtacttaaacagtctgcacttccaagaggtgttctggattttttgtcgaatggtaagagagtaaatctatcattttaaagacagttgatttactaacctggttgattttgttttagtcactgtcctctagctgattatgttttaaactctagtcctatctctggaacgtggtctttagtaataacggcattatttcttagattggaatatccttgaaggtggtggatatggggcaggtttggggtggtgtcttacctgggtattcccaggaatatgaccatgtgactatgcatacatcaaggatgtgccctaaatttcccaaaacttagacattttaaatttttctttcaaaaaacataattgaaccatttttaaatttatttatttgcagtaattagaatcaatcacttccattcatttgttgaaaagtaatagacataaataattgccaggtagaacaatagtaaatgtggtttttatgcagctatcgaaatgatcatagctttgtatttattatcttatttgttaaaatcagatttttttccttcacgggtattaatccttaatccaaacaggtttaaactgaaatgctaaaataagttatttgaattaggtactagggaaaaaaatctttcagtattaatttatgcagtatattaactgatgatttttaaaatagttttctaattgaaagtctttttaataaacatcgtaactaatttctaaaataaattaacatttttgcttcccttttcttattacaaaaggaattcatggttattgtaaaaattctagaaaatacagttagcacaaaaatgttgtaatattattactagtccaatcactgttatttatgatttggtgtatgtacttctagttcatggacttaaaaaaacattgagttcctttgagactaaacctgaccctcatgattaaaaagtctttaaggaaaacattggcatttggatgtatgaaagatgttttccaaatagggaatgtaccctctagctttcatattagaggatggggcccagcattctgagttttaacaaatcctgtgggtagtactgaagcatacccaagtttgagaaccaatggcttaatgatctccaaggtactatcaagttttgtacctagactattatgccctatatagtctattaaaatgtacagatattcttctattttattagatgccacttaactattgcctaaaatgcaggtgtcacgtgggtagtgatctttcttttgttcactgatgtgtcccaagtacctagaatagtgtttggtacacagaaggccctcaaaaatgtcttgaggctgggcatggtggctcatgcctatagtcctggcactttgggaggctcaaggcagccggatcacttgagatcagaagttggagaccagcctggccaacatggcaaaaccctatctctactaaaaatacaaaaattagctgggcatagtggcgcatgcctgtagtcccagctacttgggaagctgaggtacgagaatcgcttgaacccagagagtggaggttgcagtgagctggaattgtgccactgcactccattgggcaacagactggagacagactgtgtctcaaaaaagataaaaaaaaaaaaaaaaaaagaaaaagtctgttgaatgaaggaatgaattgagagctgcttcttacttgggggaactggggaatctacctggtccccgtgtatggttgcatggacagatgctgtgaagcttggcaccttcttcctctttgtaagtattattaagattcagttttgttacatccgtcttcagagctatctcaagaagcctataaaggatgtagatagtgtaacttccttgcaaatgttatctttggaggcgtctggagaatgcgggtgttattagatgacttctaaggatctccctgctctgtctctgtgtgtctgaaaactcttctgttcaaaaagcaacatttcaaagatatctgaaaaataaccatgatgggattttgtattttttttcgagacagagtctccctctgttgcccaggctggagtgcggtggtgtgatcttggctcactgcaacctccgtctcccaggttcaagcaatcctcctgcctcagcctcccgagtagctgagattacaggtgcctgccaccaagcccggctaatatttttatatttttagtagagacgggtttttgccatgttggccaggttggtgggatttttttattttaagaagcacatttatttaggtagttattgagtaccaatctgtactgggtagtattaccctaggctgggggtacaagataatcagggatggtcactgccttcacagagctattaatcggtctggttcaggacctggacatcaagctagagctacaattaaatgcaagtgtgatgtgcaattatttttcatttatttttgtctaaaattagatagatgtacctagactgtgctttaaatgggttgtgaaaacagaatgtcctgggccttttgcattataatttttaatttccttttaaaagaacctatgaattagggatttagggagctcatttttggcattcctgctaaagtataacttgggtacagaatgtttctgatttgggtgatggtgattttccactgcaaagttaacgtttaatttttggaatggatatttatttatttatttgtttatttattgtttcaatagagaccgtgtgtcagtatgttgaccagactgktctcaaactcctagcctcaagtgatactccagcctctgcctcccaaagtgctaggattataggcatgagccaccgtgcatggcctagaatggcatcttaaacctcaacaataggcaaaggctatctgtttgcataataattcttcaccttatttaatacctactgtgtgcagacactgtgcttaggtgctgggtataatgatagtgtcaacacagagctctagctacttgtaaggcactatgctgaatgcttgaaattctcatttagtccacaatggccctgtgagggagatagcatgatccaggtttacacacgagcaaactgaggtacagggagttttaagtaacctgccgaaaaccagttaggtatagctaatgtggcagagccagaattcaagcccaggtgatttggtgctaataatgctacatgcttaaacaaccacactgtgtcgactggtgctaactgggagcactacaccctgatgtcagaagagtcaaatagataactggtgaatactgttaatgttactcttttaggtttgatttgtctgtttaaaacataaaggttactgttttattgccataacccacatcttaaccattgcagtttgtttcagagaagatgcaatttatcctgagggagaatggaaaagtccaaactttggtagattatgagagtagggttcgatgttagtgaagttttcaaggatggcatgtcaaaaccagacttcctcaggaactgcttcatgtggatatactgatgagcctcagagcatcatgtgatggtgaccagggagtgacctcaaggtgaatagagtggggcttttctttgtgtgtgtgtttgttttcgtctcttgcagttttgtaaaacgttacctttcatactccagtctttgggctggcctcagcttctaggtttaaaaaccaatactgtttcttttttttttttttttttttttgagacagagtctcactctgtcacccaggctggagtgcagtggcgccatctcggctcactgcaacctccgcctcccgggttcaagtgagcctccagtctcakccttctgagtagctgggattacaggcatgcgccaccatgcccagctagtttttgtatttttagtagagatggggtttcacagtgttggccaggctggtcttgaactcttgacctcaggtgatccacctgcctcggcctcccaaagtactgggattacaggcatgagccgtcgcacctggcacaatcctgtttcttgatgtattcttttaaaaaatgtttaaaataagagatggggtcttgctgtgttgcctaggctggtcttgaactcctgggctcaagcagttctccctctgtggcctcccaagtggctgggactataggctgtagtcaatgtgccaggctcttgttctttaggttaaaaaaaattaagtagaaatagtgaagtatttgataattttgttaatttagagtgacttttttgtcccgaatttctacgtctggagtttctcttagtagtttcctgaaaaatagaactggaatctctttagctgtaaacaagataaacagtttaaggaatctatgggtcacaagtgagaagtgacctaatacaccttacaaagtccccatatttcttttattgagatagaggcctttaaattttgcctttaagttaaaaaagtcaattcctagtgaaaaaacaaaaacaaaaaactaaaacataaggcagtgtattcttcattaggtggcatatgaaaatttgactctagctcttagctcaggtggtaagagaatttaaaaatttttagatttctgcagggaatttcccaactggagttaacttgaggtttctttaaacaataaaattgatttgtgtaattttaagttaatgtgggttttatgtctgaatctaatttttttctctttaatatttaatacttaacatacatatgttactttagatttcatagagtgcttttctaacataatctcttttaattctcccaggaatccattgtgctaggcattatcattctcatttcatggatgagaaaactaaggctcagaaaacacaagtaacttgcttattatacctcagagctagtaagagttgaggtcaagactcaaatgcagaacttctgattacaagttttttaccctttgctttacaccaacggtcccggacctttttggcaccagggactgaagtggttttgtggaggacagtttttccacagactggggtaggggtgggtgtttcaacaaggtatttctggcttatcttataatttccctttcccagcaccaaagtcagccagttctccaggcagcatttttttcagtggataacgatatgagaagccaagatctgagcactaggtatgctcattgtgatgggtgactctgttcccaaggccctcagctggcagagctgaaaaatgtatgtactgtatacacacacacttctagattcatctacctatcatctctctgtatctacatagtgaaaaccatgagttcacactaataccaccagttctggtccaacaccacaggatttatcccagtgttctccctttccatatttgaaacactccacatgcttcccctggccccagcagatgttcttctcactgttctcaggctctgacccctgagctgggcctccctcctgtgagtctgccttcctcatcccgctggtgcttggtcccccacagcaggctgctgcctacacaaatctccctgttaccttagtgtggggctgtggacctctgtgcccggccgcctcgcctccctctgcaggtggataccctccttaccctgcttgcgcttccactccctatgtcttgctcccgctttgtgcagatcccctccttgttctgattggactctgggctaccccattctgtttggcccactctgggccatagtggtgcccccatttcaacccggcttgaatgactacgttgttcacctcctcttcagtgccccaccccaacggtttaggacaatcgtttgggaaggggaagggggccagaataatttgttttttttaatttttaaaatgtaaatatataagaatattttaaaaacctttatgtggagtgcctgctgttcctggcacttgttacttgctgctcatggtcatggcagggatgccaaggtgagcctgacttggtctctgctttcccagagctcacaggcaactaagggagatgtttatgtaaatcaccacatacggcatgttaaaactgacaacaggaacgtggtgggattggaaggataaagacgaattcacagacagtccagggagggtttttttggagaggatgtttctgacggagtagtttctacaaagggactagcaaaagcagcctggcatgtttcattaactataggaactcaattttcaggtatctagtgtaatcttctcattatactataatggctaagagtaatgttttcatgaagaaagaaaaaaaatccttcatagcctatgtgtgaaatacatacacagagtsaataattatgtacattttagattttaactggggcatccttttgtgaatgctaactactttgattttaccttagaagtcttttactttttgcttgtaagcataaatgatgaggctgtcttttattattgtgatactatttgataaatagaaaaactataaagtaataatttgggtttgttgtataattaaataattaaaagtcctctgcggtgcctgctaagttaaaaaacatttttttttttttaaaaagcatctaagcccggtggattttgattattaggaaggaagaaaaacttcaagcacttatttaaaatgggatgcttctgccaggaaagaaagactagtaaatgagacagcagacagagcccttgaggatgcgatttaaacatgtcaccagaaattgtttaagtggagagctctggcccttttaaaacactgtctgtcacttgaggattgggtcaccttgaaatgtgttcatcttttgagttaaaggcataaaaaggcactttgaaatttttcagttaactttgatgtgtgttgtgtatgtgtctacgaatgtacttctcctcagcctgcctcagctgtaacagtgagttccctagaaaccaaagtggttgcaagggaaggataaatgtttaatcttggctccagcaaactmtacagattttttaaatgttgagacactctggctgcaacttctggctctctgtatagtcaggccttcctcccgcaaagcaaagtctaagacaagagtagctgctggtagttatttcctaaaaaggtgccacttaactggtgtctttgttcttttggaaggtggttaatgatgctaaggtctttaaagtctggaaaaatatccagattaactgctctcataatccagattcagataaggttttcaactgtccgcctaatggactgccccacagcctgagaaagaaakgtgtgtgtgtgtgtgtgtgtgtgtctgtgtgtgtgtgagagagaaagagagagagagggagggagggagagagacagaaaagggatttcattcaaatgtctaaaatttgacattgaactaggtatctggcctgctgaaggtatagatagagactccttatctgtgatgtagagattcttgaataaacattacctcttatgaatatttcagatactcttttctaggaaaataatagtgtccacacttataaggctacctctttttgttgttgtttttcatgtcatggaatttcctagcagaaaggcatgtttgttatcagtccaacccccttctgttgtgggtaagaaaactgagacctagggaagttaagcctgtagtcacatggctggttagaggtagtcctggaatggaaattcaggctctgtctatgctggtttagtctagcacgttgcgttaccttcttttccactagtttaccatgagcttggctgggctctgaccctgccttagaatcacctaagacgcttgttaaaaaacacagattcctgagccccacaatagctttaattatttgtattatggaagctgggcgtggtggctcatgcctgtaatcccagcactttgggaggctgaggcgggcggatcatgagatgaagagattgagaccatcctggccaacatggtgaaagcgcgtctctactaaaagtataaaaattagctgggcgtggtggcacatgcctgtaacagttccagctactcgcgaggctgaggcaggagaattgcttgaacccaggaggcgaggttgcagtgagccgagattgcgccactacactccatcctggtgatacatccggagcgagactccgtctcaaaaataccccccccaaaaataccaaattatttgtattatggggagaaagcccatgagtctgcatttttataagattcccagatagctcttatgaatgaatactgcaggggcagaaccatgcagtaagctgtggagtagacccaggttcagattcagagaatctttaattacgagctattgtttttttgataaatcttatgtcatttttaccttaatcttattatctttatatatcatatattttacactgataagcaaagtttctctaagcaaatatggaaagaaataagcctttttatttgattgagataagtgaagaaatgtgttaaagtgaatgtgaaggcatgttggaaacatcggggtgacgtagtgaagtaagtgcatatatctgaaaagtgcactgtgtctgaaaagggacatactttattcaaatgatgccagtggttagtggaaggatataatcagtgttcttgatgattttggaaattgacataaggatatcttctctgtggtctcagagactggaggagatagacctctaatcccattagctgaagatgtgagattaaccagaaagagtaattccgttaattttctggtagaaaaaaacatattcatgtttccttgagattrtggattaagtttgtattttggactcagggaagaaagtaggttgtaacaattcctattgtatttggtgaaggagctcaagatctgtatattgtggtattttgagggagattattttttcttcagtaagtagcaagaaacttaagtgcttctaataattttccaaagaggccaggcatggtggctcatgcctgtaatcccagcattttgggaatctgaggtgggcagatcatctgagttcaggcattcgagaccagcctggtcaacatggtgaaactttgtttctgctagaaatacataaaaaaattaaccgggcttggtggcgagcgcctgtaatcccagctactcgggagactgaggtaggagaatcgcttgaacccaggaggcagaggttgcagtgagccgagatcacgccattgcactccagcctgggtgacgagcaaaactccatctcagataataataataataaataattttccaaggaataaacaagaaatgtattttagttttgtgtctttataagcagagttttccttttttaacttttgacttcttaggaggcaatcattattataatctcaaagtcattcattcagcatgtgtatgttgagtactgtgaactcatcactgtccatgtctttgtgaaagctataagagcaatagaacttaggagccctgcccttgagaagcttaccttcatcaaattttaaaatatccccggggaagtacgctgccttattcttgtcaaggaaagcaaactgtggccatcatcaggatatgcacttgccctgtttgaaatgattagccagtcaacattgtattattaacctttagataatcatttaaaaatgctgtgggaaatctcttgagctaggcaaagatctcatatggatttttattagtgaaaacatttccatagatctgtctccagcaagaaaaaaatcataatttcagtctgcagatgaatgctatatttgactgagtgttgcattaaactactaatatagagaaattttgggacacagtgattagcatgtagagtctagaaaataggcattgatgctgataatactgaagaccgtctgaaagaaaagcatcctagagaaagttcagttgttttggtgcttgacagtagttgtttttacaggccaagttgaaattaggtatcctgtggaaagaatgtcagggaatgtgtacctgcccatttgtgcttcattgaatgcactgtggtttatctgggaaggatacaggattgggacccaggcactttagttgtagacctgatagcatctagctgtggaaccttgcggggtggggaggggcttcagtacattggcttgtactttccaagtctgtaaaacagacacacgagaatgtaggttcatcagttgtaaggtttgtaccactctggtgggggatgttgataatgggggaggctatgcatgtgtggggcaaagcttgtgtgggaaatctctgtaccttctgttcagttttgctgtgagtctgaaactgctctaaaaaatagtggtttttgtttttgctttttttttttttttttttttttgagacggagtctcgctctgtcgcccaggctggagtgcagtggcgcgatctcggctcactgcaagctccgcctcccgggttcacgccattctcctgcctcagcctcccaagtagctgggactacaggcgcccgccactacgcccggctaattttttgtatttttagtagagacggggtttcaccgttttagccgggatggtctcgatctcctgacctcgtgatccgcccgcctcggcctcccaaagtgctgggattacaggcgtgagccaccgcgcccggcctgtttttgcttttaaaaaacagacacagatttctgaaaacccttctggttctgaacttcattgagtcttctgatcattccttaaaatgaccatttggtggaattgtaggtctagaatgttccctgtgcttgcagttcagaccttttccttccttctctggccagcataatcttctctggctttcaaggctctgaattccagtgatcagtttacattttcagccctatctctgatgactagacacattatattttctctttctctagatcttaagtcaaggtctcatgaatgtataccttgacttaaaaattcttatgtgaacagagccttttattttgtattcattcctctgcatggcagaatattggttatagtcttccttttttttttttttcataaaaatatcttgtgaattcatctcttcctctcttctattccctaggcttggctcattctatcacacatctgaatcacaatggtggcttcatagctggtttctttacctctgggctttctcatctgcccctggaaaatccatatttggttaaactttttcttgttgttttttcaaatagaacacatttattcatctccaatttgcttttctgattatttggtttcttcagaatgttctttcatttcatgaaaagtatataatcttaaacaaattactgtattctcagtctttagttgaagaaaataattgagttagtgagtaacagccaaataattctatccagaaatatttgaatgatgttagccaggtaagaattctaaagactgaaaatagagttgtctataaaattctattaaaattatatatgtggttgggttaggtggcttatgcctgtaatcctaactctttgggatgctgcagtgggaggatcgcttgagcccaggagtttgagattagcctgggcaatatagcagactccaacaaaaagtttcaaaattagctgggtgtggtggtatgccgctatggtcacagctaccttggaaactgaggcgggacaaggttacagtgatgatcatactgctgtactgtagcctgggtgacagagcaataccctgtttctaaaattaaaatgtatatatataaaagttaaataattgaactcagtaaatatatttttcactgtagagattacaaatacaatattctagaaataacttgggtttttgaattatagagatctgtgtttccatcttagccctgacaagtatggtgtgaccttgaacaagtaatttaatatctgagcttcagctgtttccttatctgtaaaatggacctaatggctacctggtagagttagtgagactattaagtgagatatataattaaattacctttaacttgatgagtgatcaataaatggtagccattattgtaattccaatcgatcctatattgtgaaaatacttggctttcaccatttcacctcctccctgaaggcttacttggtctcctctgctagacttttcaacactgatctgctaagatactttgccttcttttatggtacctaccaatttcagccttgtgtttttatgttctaatgctgccttattaataggctgcttgagggtaggatctgtgcttatcgggcgtctgtatcacttatgtcaccttgaacagtacttttcataatgtgaagacttgttttcatcagtgtttgttgaatgaataaggaagcattgctccccttgtctgggaagttagaatggccttttactgcctggtgtaccaagcccagacacttcattctctctctctttgaagatcctgggtcatttggccccattcctgttaccctcccacccccgagccccaacccctttgctgttgtcaggctgtcttggtctttgttctttgggaatgttggtcctgtttagaatgcctcttgatgttatctgctctgctattggaaattatccctagccttgaaggtgaagcttaaattccttcactttcataaacccttctcttattcctcttgttccttaagttttaatgcttaattatttttttctctgtaaattttcttcttattattttgaacacatgccccttaacaccaaagacaataactagaacataaaaaaggcctacctatctgtaaactttggagaacgaatcaatgtggcagctttactcttttaagtgtgaaaaaaaaagatgtttaaaacttgaaccatctgggagtgaaattgttctaaaattaagtatctttaaaaaatgtttttgcctaattgtaaaggtatacatagattacctttataacttatctgtaaattatcaaggaaattaaaattcacagattttcaaggaaatcagaattgcctagtatcatctcctgaagaagtagaactttgaaggtttagtccctgtgggaggtgcagtgcaatggggagaatttaatcatttttgctgacttagaggaccttacaagcatcaaagctgctgtgttttcatgcagtgaggccctcatcaactcctgaggctttttttttttttttttttttttgagacagagtcttactctgtcacccaggctggagtacaatggcacgatctcggctcactgcagtctccgcctcccaggttcaagcaattctcctgcctcccgagtagctggattagaggcgcccaccatcacacacccggctgatttttgtatttttagtagagtcggggtttcactatgttggccaggctggtctcgaactcctgacctcaggtgatccgcccgcctcagcctcccaaagtgctgggattataggcgtgagccactgtacctggtcaactcctgaggcttttacagccactttcctctgatcaagtggccagtactgctcttcttttctgaggcactgttttttttttcttttcaagatgaagtcttgctatgttgccaaggcttgtgtcaaactcctggcttcaagcagtcctcccgcttcagcctcctcagtagctgggacaacaggtgtgtgccactgctcttggctcactgagtgtattttgatataaacttttcgattcctcccctgtgatcaggctctcattcgtctatcatagcaatttccacttcagatatggtatttcgaatatgcagtaggcaagaaacaagagaattggccgggcgcggtggctcacgcctgtaatcccagcactttgggaggccgaggcgggcggatcacgagatgaggagatcgagaccatcctggctaacacggtgaaacagcgtctctactaaaaatacaaaaaattagccgggcgtggtggcgggcgcctgtagtcccagctactcgggaggctgaggcaggggaatggcgtgaacccgggaggcggagcttgcagtgagcggagatcccaccactgcactcccgcctggggcgacagagcgagactccgtctcaaaaagaaaaaaaaaaaaaaaaaaaagaaccagagaatccaggttaccagaattgtgggtaaactaacaggacgatggttctgagtggagttctagcagctttcaacaactggaattcagccctcatgccttagggcacccgttatatgtaacgaattaactctccagtgtgtctagaaggataccagttcttcacttggagaactgaggaaatagttgttcttgagtgtttttgttttgtggttcaaatgagaaacctttgttggaaaaggctgctggggtccttctgaatagtcaagtacataaactatctgctatgtctatcatgctaacacatgatactgatcaagtagttacataataatataattgattttgttaaagttggtttacttaaaacattttgaaagggagatgctcttcatgaagatggtaatacatataataaagattaatatttactgattacttagaacatgctaggcttttctaggtccctgcattgtcttctactcctcccaacaattttattccgatttttatcctgattttacaaatgtgggagctgatattttgagaggtgtttatttggtaagtctcattggtaccattctgtgactattttagataaataatcagagacaagtgttcatacactattacttaagaacagtaacgcttttttgtggttgccaaaatagacattggtttcagaatttaaatatgtaagttttaatagcaaaattactgttataattctcagtaggtcatttaaaaaatatttgcttaaaaagttaggcatcaggagtaatatgaactcacaaacttcaggaaatgaagttgttaacaccccacataagttcatacaaacttttcatagtttgtatgaaaagtaatcaacttgcccatagtcatacggctagcaagagaatggtgagccaggaattagctgtagtgtatgtggttccggagattgcattctcaatctgaaaattactttatatacttttgtatgttttattattcatataaccttcacattccatatacaactagctgctaattatctgtcttttttaaaatgctttttttaaaaattaggaattcaaaatataatgagattacacggatgagatttagattgatatggcatggaatagtggctaaaaaccatataagggaagaaaaagtagcagacgaattagaagttaatttatatttctcttgctaacttttaatgaaactgttcttggctcaaaaatagttaaaactttttaaattggaaaataataattatctatttaggggatacaatgtaatattttgatacatgtatacaatgtgaaatgattaaatcaagctgagtgacttcatcacctcacatacttagtttttgtgttgagaatgtctgaaatttactctcttagccgttttgaaacatacatgagtattaactgtagctaccatgctgtgcagtagatctcaaagacttacttttcttgtatgactgaaactttgtaccctttgaccatcatctctaattacctgccttaattggaagaccaaaatgaaggtagatatgaaatctacaggtaatctctaagtgttattttaattaacaaattttaaatttcttgcccattattccacttacagagatttttgaacaagaaacagaaaggattactttaaatttcaactctttctgtatttgcattttggactatatggtggacatgccatgtgcaaattgtgagcacaggaaaaggctaagggctgagatcaccctgtttggactacttaacccttgagtcattgagccagctgatggcaaggacagcccttatgaagtaggggagattttgcctgtgggtgtgttggactcttattgcatgcttttcccacccccgaggtgtctacttggagagtttcccctattaaaagctgtctgggagaagaatagaaaattcggctctcactaaagtgtgaaagcctattggtgtaaatagctttttcctgggaaaggtaagtttggttggtaccaaggaatgaccctttatatgtgcagtttaaaatgtttaaccaaagggaatatttggttgtggggagccttttgggtgtccctgaaatcttgccattttgacttctgtccatcatggtttttgtacacttgaccttacttttctcagccttctagatctgtagctgttaaatcctgtcctgcagacgggagcagcgttctctgtgaaaactggacaggagtcagctcctttagagcactggctcagccacgtgacttcttccaccagggcttcgggttcagctgggtcaggggagcagaggcgggaagcttgtgtccctgtggagccccactagggagaatgtctcccagcaaccagcatccaggccacagtgatcgcagagctaacccacactaacttctgagtgggtacatctaaggactccctttttaaaggtggaatggggtactttaaagtttttgatgacttgtcagagcatttgaaagcactgggaaaaccagccgccttgtcaaaacctgtgtcacttcttccagaggagaaattgcagaaagagagcaggtgccgtgggaagcagtgttttgaatcagcacccagcaggtggtgatttcccctctaattcggttttgaacagatactcccagacagtgttggcaatcactgtgctccataatgtagcggaggcttgtttgtttgtttgttttgggagacaatatcagctcaagccctgtctgcttatagtcacagtattttagcacatgttagatgcctgctgtttaaggggtacacctacattccaagcttcttctgtgtgtgtgtctgtgtgtgcatgtttaaatatatatttaagcacagaaaaaggcattaccagagatcttgagactgttaagtagggatctggagagtatttgatttttttctgcaagtcaaaggtagtgcaaaggtacatatacagtatgtacatatacagtagctacacaacaaatctttcttttttaaatttttctttgaaaacttagctcacttcagtttcgaaggatgaccctgtatcccagttagagaatttggttatagagtttgagcccatcctgattaaaattttcacaaataaatatatatgttgggatgttagtatttaattacctgtagcttttttgaaaagagattggactttcagtgagactgacgggcattcaaatcctggttcttctacctataatttttgagttttgtaagtaaaaaatagtgaataaaagctaggtcatagagtaactgtgaagattaaatgaggtattatttgtagagcagttggcgtggtgcctagaatatagtgagccacaataagaattacagacccttccctttactcaaaatatattaggaatgttggaaaattctgaccttaaagctaaagaataattgtgaacaggggtatttgctgactggaatataacatgaggttgtgagggaaaaaaattcaaagagtgtaggcagttggagcctcaatgtgtgctaggatataatggaagttgaaactagacacgtattcaatacctttatgctgattttctttcatatggaaatgtgattaaagggtagttatcaattgttttttcttcctgagggaatttatccatcccaagttcttttatttttcagattcttttttgatcagcatctttaaaattaatcaatagccaaataacagagtaggtgtttatttgataagtctcattggtaccatcctatgactattttagataaataatcatagacaagtgttcatacactattacttaagaacagtaacacttttttgtcgttgccaaaatagacattggtttcagaatttaaatatataagttttaatagcaaaattactgttataattctcagtaggtcatttaaaaaatatttgcttaaaaaattaggcatcaggaatagtatgaactcacaaacttcaggaaatgaagttgttaacacccctcataagatatgcttttcatagtttgtatgaaaagtaaatgttcctgggagaggtcttgtattaccttaaattcatggtaaagtataaatgaccaaaaatagattttttcctgaaatgagacttaagtggggtagtttgtggtaagagtaggacattgagtactgagctgtggtaatagggcagtaagtttcaggaaaaataggtacagatattgtataatcttcaagttccattaattgtttcttctttttttgagagcttaatatacttatttaaatttaaatgaaatagttttcaaattgttttaagtgttttctattatggagatataaataatatttaggatattttcacaggatttattgtttgcggatctgttttagcatgcaagtattcttgcagtcactctaacttgcgtgactagcacaacatccagcataaatagcagctttaggaataacattttcagttgaccgatagtataaattcaataagtaacagagcattattggacattctaaaattttaattttggaaagttcttcatctagtagttttcattgagaggaaagagttaagtggattttctctgaagcgcttggttcctagaataattgattaaatcttttcaaagcactgagagttgactctttacccaacagggggccaaagttatccagcttcttgatgaatttctctaaggtgtaatgattctctctgtaagttaggcacatttaggtgcttgacaaaactgtcatcagaagttttcccagagtacattaagttgaaaaactacatgtttggaaatctaaatgtgctttattaagtcttttatggagttatcttcatgagagcatgctatggtttggatgtggtttgtctacactaaagctgatgttcaaatttgatcctcagtgtggcagtgttgggagatggggcctagtgagaggtctttgggtcatgtaggtggatttatgtgaacagatttatgctctctctggggagggagtgggtgagtgagttcttgctctcttgggaatagattaattctcatgagagtgggttgttaaaaataatctggcttccttgttttttcttctgttgcttcgtctcttgaggaagatcttgtgagtttttttgcacatacctgctacctttcacgtgtccgcttcccctttgaccttttgccatgttatgactcagcagaaaagcccttaccaaaagccagcaccacactcttgaactttgcagcctacagaactgtaagccaaataaaccccttttctttgtaaattacccagtctcagttattcttttattgcaacacaaaatggactaagagcatataataatgtaaccaagatattgacaataaccatcttgtgatatgaaaacttttgtctgttaccaaatttatccaagatgttaatttgactgaaaagcatgaaagagaactgatttttagatgacagctttccaaagcattgttagttcaaggattaactcacaactttaggtgtgtaaatatgtgtgtgtgttttccatatttgacaagaatgtatgaacccatatgatactttaccttaaagtttcactataatttgttggctggacatggtggctcattcctgtctcccagcactttgggaggtcgaggagggaagatcacttgagtccaggagtttgagactagtctgcacaacatgacaaaaccccatctccataaaaaatacaaaaattagctgggtgtggtggtgcatgcctgtagtcccagctacttgaggtgggaggattgcttgagcctgggaggagtggaggttgcagtgagcaatgattgtgccattacacttcagcctgagtaacagtgagaacctgtttaaaaaaaaaaaagtttcactataatttaaaaaagaaatttcactgaggtgtaatatgtggtgagaacatttaaagtctattgttaacgattttcaggaatacaatgcattgttattaactgtagttaacatattgtacagtagatctcttgaactcaatagatcttctaaccgaaatttttgtaccctttgaccaacatctccccagtcgtctctctccagcctctggtaacaccattctactctgtttctatgaattcagcttttttagagtccacatattaagtgaaccctttatgtggtatttcacttaatgtaataccctccaggattatctgtattgttgtaagtgacaggatttccttctttttcaaggctgaatagtattctgttatttaggtttactacattttctttatccattcttcattgacagacactgaggttgattccttatcttggctatggtgaatagtgctgcagtgaacgtggtagagcagatgtttcttcaacatactgacttcacttcctttggatatatacccggtagtgggattgccggatcatatggtagttctgtttttaattttttgaggaacctctatataccattcttcataatggctatactaacttacatttccagccacagtgaacataggttcccttttctccacatcctgtcatttttttaaattatctgtttctggaattcctactccttagatattggactttccacactgatcctctgattttgttatttttcccatttcctattttattaaattaattttttcctcctagattttaaaataagtaaatgtttgttataccaaattggcagaaacttggctatagtttctccctttttccagtctatcttatacaccaatctgatcaaatcgatgactgtgatccactggtatttcaagtctagagtttgaatttcaggattctctgtgacttcatatcggtatacccatgcaaccatatttttactcccacatgtaacttttaccgttgttactgttttggaaacaggctgtcaccattcccaaattggtcttcattttatactcagtgtttgaaatgtctgtcttctccttgattctcagttaatttctactaatctatcagggcaggtctgtcggcttgttgaaaccttctccgaccagcctcatcttttcatagtgacagagttggagctggaatccagtttcctgctttgttctatactgttatgccctatatttagcactgctgctcagatcaattaaatgatgactgtcaggccacgtaagctggttctttcctttttgtcagtgattgccttctaattctgtggttaagttactcagagaaggcctccaacatcaagttggttgtactaggataaagcactgtaaaacagctaataaagtgcctggtggagttagtggttcataaattgttatccatggttttcaactgtgaatccagtaatggcccatatcacagaaccagaacctagagttccctttttccaggtcaaggctgtgttcccagtgctggtgccttgcatattcctgtgaatctccatccatggctacccagtacttggcctcagtagacagcctgcgggtttggatgtattagaactgtgctgttagaagttttacaataggccctgcgcggtggctcacacctgtaatcccagcactttgggaggccgaggcgggtgaatcacaaggtcaggagatcgagaccatcctggctaacacggcgaaaccccgtctctattaaaaatacaaaaaattagctgtgcgtggtggtgggcacctgtagtcccagctactcaggaggctgaggcaggagaattgcttgaacctgggaggaggaggaggttgcagtgagccgagatcgtgccactgcactccagcctgggtgacagtgagactctgtcttaaaaaaaaaacaaaaaaaagttttacaataaactcacttggaactatagtaaattcaaaacaaaatgggtgggaaacttaacagatattttaactgcctctttcttcgacttcttgattcaagacaagaagtacatttctcaaacaacttttgatatgtgaattgctgaggaaaactatatagtcccaacctggcaagttaagagttctttgaaattgttaatgaaatacttcatgctgggaacctggtagaagtacttaatttctgaaaaatcttttgataatgcttcccctaagagtttaaggaaaatgctagcagagtaaaaagtactacctttttcataggtttaaacatattaaaacaatagcgaaaaagattatgataaagctgctgttcctcccagagaggtcagtcattggttgacaccactttttttatagcaaatatttccagagctaacaaaactctttggaggagagtttggaaaaacaattgacagacatcaagttaaggtttttgaaaaactaaaaatatactagttttctaaataaattgagctgaatttaaatacatggacatccattgctatgatattttaaagtttcactgtaattttttggctgagtatggtggctcatgcctgtaatctcagcactttgggaggctgaggtgggtggatcacttgagcccaggagttcaagaccaccctgggcaacatggcaaaaccctgtctctacaaaaaatataaaaattagccaggtgtggtggcatccacctgtagtcctacctacttgggaggctgagctgggaggattgcttgaacccgggaggtggaagttgcagtgagcaatgattatgccactgcactccagcctgggcaacagagtgagaccctgtctcaaaaaaataaaaagtttcactataatttttaaaaagaaatttcattgaggtataatatatgttcagttttcacatatctgtaccagtttcagtgtaatttgatttatttatttttattagtgggattttaaatatttacattttaaagttggggaagataaaaataaaataattcctagtctgccattttatttttatgaagcaggttgctactagaatcttttcatattggtttctatatgttgtttgttgttgtgtaatatattactccaaaatttaggggcctgaaacaataagcatttattatctcacaacatttctctgggtcaaaaatttgagaatggcttagctgggtggttctggcttggggtctctcatgaggttgcaatcaagttattggcccaggcagccatcacctgaaggtttggctggagctagaggatctgattccaaagtggctcacccatatggttggcagcttagtgctgacacctggtgagaagcctcagccctttaccatgtgaacaccctcttagggttgcttgagtatccttatgacatggcagctggcttctcgagtgatccaagtaggaaggcaaaagccaccatgtgttttcttaccaaatattgaagtcacacgtgggtatttccacaatctccacttggttacataggtcagctctgttaattatggaaggggcatgaatactaggaggagagaatcattgtgggtcatttttgaggctagctacccgtttcccttatttgctatgttaattattttaacttgcttttgtattagtttcttcctatggctaaagatttcaaacattcagaaaagtaggactagtataaagaacactcatatatctgtcatgacctaacacattaataatttactgtttgtgttggcagttttttctgcaatatcttaaaattatagacattttggaaaacattttactatatgatctggcccttgccgccctctctttctttcactcatagacataaaaagtttgcactttaaagaaattaatatattttcttacagtaccataacatcattgtcacagtatccaaatttgaaataattcctggttaacatctaatactgagaccatatttaaatttgttcagttgtccccaaaatgtaatgtattttatagctggttaatccaagccatgatacaaatgaagactatgtattttattcagttgtgtttgtcttcctttagagcagaactccctttttagtatcattatactgggttatgttttgtgtagattgtctcaccacccggatttgtctgattattttctagtgatgtcatttaacttatttctgcatcttctgtcttgtgttgtcttgtcttgtcttgtcttgtcttgtcttgtcttgtcctgtcctgtcctgtcctgtcctgtcctgtcctgtcctgtcctgtcttgtcctgtcccgtcctgtcctgccctgccctgccctgtcttgtctttcttttttgagatagtatcttgctctattgcccaagccagagtgcagtggcatgaacatggttcactgaagcctcaagctcctgggctcagcctcctgtatagctgggaccactggcatgcaccagcacgacctggctaatttttaatttttttgtagagacagggtctcaccatattgcccaggctgatctccaactcctgggctctagcgatcttcccatcttggctttccaaagtgctaagattatatatgtgagccactgtgcccagcctgtattttctttaatttggaagttatatctaaaacttgattcgattcagattaaacagttctggtaaaagtacttcagaagcgatgctgtgtattttacatatcatatcatgaggcacagaatgagtgcctggctatcccattataagtgaagttaagtttgatcatttgcttaaggagattatagccacatccgccagtagtatasttccagtttcccgctttgacctgcatgtcctgtatgagttgatactccaataccatgtgaatgtctcatttttcattaactttttacccagtgtctttagcatccattggtaatgctaatgtattatttcattaagggttacaaaataatgtagtttgctttagtttgattcttatgttgttaaattacatgtttttcttctcccttctcctttggtggttaacactaactgcacaatatttgtggttttgaatcctttttccttgcccctagatgtccctttctttttaagtttgtttatcaagtagtagttacttaattaatcttggttaagtgaatggctatacttcctttattctggtgtatcagggcttccccaaattaccagctccctttttcattaagttatgtgtttttgtcatcaattcatcaaatatttgtagaacatttgctatgtgtcagttaagtacagtgatgaggagctgggctgttattaatgaagtagtctgaatccctttgttttgaggaagctctaatatcttgttggcaacatccaagtaaataattcaactatcacaacataaccactggattatgtgccagggcctgatagacaatgaacacctaaatatttatttactgacttgggtaagagttgtaatattgatctgttaaggttcagtggagcccagaggaagacttagtggttgaggagctggagaaagttgctcagaaatgacattgacttggatatttgttagggtgacttagcatgcaaattagacacttttgacagcaaaagggagcactaaaaatacttaaaattatataattaaaaatattgaatgatacattgcctttattttattggtagatcttctgttcaagagaaaatagttccattcaaacagtaaaaaattcattctaacactaaaatatactcatgtacatcaaagccaaaaaatgtatttatattatctcagcattataaaacaacacaagttgaattattactctgctttaataagcttcttagctgtatcaatctatgtgtctaagttgcattttgtgtttattaagtttaaaattcttgatagttttcaattgattcttacccatgaaatgtgtttttaaaattgagaaaatattttctctataagtgttgagatacttggtaaatttagcacattctataaatggaggatattttcaattcacattttttaattgaaatgtgtaaatattttaccagaaatgttttcacagctaatatatttttgcctccattctgagacaaaatagtaaatatttttataagacaaaacttgtcaaataagatgtttctgtttatgatcctttgggatattttgctaattcaaatactgtaaaattaaaagtcttctcaatttcatttctttccagtacagaatgtaagcttatctaatttaaaataggagcttgtggtagctagtctccagagatggaccacgtctctggtattgatgcctttgtgtagtcctgtactgcattaattctgggctgaccctgtaagtccctttaaccaatggaatatggtagaagtgttgctctacagctgcttcaacaattttgggtgctctgagctgcctattaagaaattcagctaccttgttggaaaaggcacttggaaagggagaggtttgaggactacatggagagaaagaaggagacttaatgtcccagcagagcccagtcttccagccgtacccttcaaggtatcagaaatatgagtgaaatcatcttgcatttcccagtcccagccaccatctgagtttagccacacaagagatctaaagtgaaagcagcagcacaaccactcagctgagccccagtcaacctgtcaggagaaatagaatgactgctgtttttagccacaatgttttgtggtggttgttatgtaacaaaagacagtcaaaagagacaagttgaagtattccaaagtgcaactttagaattttaaaattaaccccatgtatactagttgaaatctcattatttaatttgttcaaatccattcttttgtaggagtaaattttatgtctccctctttgcaaaattgtcattaataattgaagttcactaacagtttcaaaaacaagaggctttggtgttttatttaatatttttttaaataaaagattttcaactgattttgaaaaaaaaaagccaacatttaaaggcctcatttagaagatagttcaagaccagtgtacatcagcttagattaattgacagaatggctcttaactcttcaaagaatcagatgtttctagtattcagctgatgagaatcagcagagagagtgtgtgtattgccatgaagaaagatttatgtttaatttaatgtcacctttttcacaaagatcagatcgttcttttattctgtgtataaataaaatgtttaaaatttggcaatgacagcttttactttagttgttagactatggaagcatatttggatgaaattatgaattatgtgtctgtcacaaagagatccaggtatatttctgttccataggtttcctaatttaataagaacatatttttaccatgatactacaacaaaatttgtatccatgttgtcactgcaaaatcacataattatgtgtttatcctaacctctttaactgaatttatagtggtagtcacaacaatgtcagttattttatcttcagcaaaatagacttccggtttttttatttgataaattagatttttaaaatgagtcaatattcaaattaactgattttctgtttgaggcatctatgactctgctatgaaactgatattttctagtatttttggagccaacaacttaataactactgctttcctttttttattttattttattattatttttttatttgagatggagtctggctctgttacacaggctggagtacagtggcatgatcttggctcactgcaacctccacctcccgggttcaaacgattcttctgcctcagcctctcgagtagctgggactacaggcgcatgccaccacacctggctgattttttgtatttgtagtagagacagagtttcaccatgttagccaagatggtcttgatctcctgacctcgtgatctgccctcctcgacctcccaaaatgctgggattacaggcgtgagccaccgcatccggcctgctttacttcttacacattcactagaaaatttagatctaaaagtgagcaatatttagaatagtcatttatttaaatggaagtcatgcttcagagttttctggtaactgtatcttctgaatatgtgttaaattgccatctttggacacaggcatcctaacataactactaattttttgaggtagataccgatgctttttagcagatttaggtcatcctggagtctgatatataaatagatagatagatagatatctttggtttccatagcacgtggcaaatgttgaaaaacattttgtgcaaattgcagataatcaactttcctgagaaatgggaattgagagtaaaattttttattaaacatactttttgtgaggtcattgtaactgatagtttttgttgttgttgtagaattaaaaagcctgacccaaagaaaatagtttagatttacagaatttgataaatcataaaagcattgctttcagtgtgctctctgcaaggaacctagtgatttcccgtacatatttcatgttcacctaatctacagtagcggctcattgacctactgactgtgggtgttgtgtgtttgtgtctcttgcatgattgagctcaggccggggctcaactagctgctatagcaaatgggtataacagagacacaacagtgttgaatacttctcctactgccacccaagagtagaaggacttagccgtctgtagccacaattttttttttaatttcaatagtttttgaggtacaggtggttttggattacatggttaagttctttagtggtgatttctgagattttagtgtacccatcaccctagcaatgtacgctgtacctaatatgtagtcttttattcctcacccctccctattctctcccgctgaatcctcagagttcgctatatcatccttatgcctttgtgtcctcacagcttagcccccacttataagtgagatcataggatgtttggttttccattcctgagttacttcacttagaactgtggcctccagctccacccaagttgctgcaaaagacattatttcgtttccttttatggctcagtactccatgatgtatatataccacattttctttatccacttattgattcatgggcacttaggttgattccgtatctttgcatttgcaaaatgtgctgcaataaacatacatgtgcatgttgtctttttcatataatgacttcttttcctttgggaagatacctaatagtgggattgctggattgaatggtaagttctttaaggaatccccgtactgttttctgtagtggttgtactaatttacattcccatcaccaatgtaaaagtgttcccttttcaccacatttatatcaacgtctattattttttgactttttaattatggtcattcttgcaggagtaaagtggtgtctcattgtggttttaatttgcatttccctgataattagtgatgttgacctttttaaaaatatgtttgttggttatttgtatatcttcttttgagaaatgtctatttatgtcctttgcccacttttaatgggattacttgtttttttcttgctgatttgtttgagttccttgtagattctgaatgctattcttttgtcggatgcatagtttgcgaatatttactcccactctgtgggttgtctgttaactttgctaatttttttttgctgtgcagaagcttcttagtttaattaggtcccatttatttatttttgttgttgttgcatttgcttttggggtcttagtcatgaattgtttacttaagctaacatccagaagagtttttctgatgttatcttctagcatttttatggtttcagatcttagatttgtctttcatctgtcttgagatgatttttgtataaggcaagagatggggatccaatttcatttttatacatctggcttgccagttttcctagcaccatttattgaatagagtagccacgaatattctgagtaccctcagtaatcagtgaatgcctggcatgctgggagtgttagttttgttatgtccaggagagtggggaagagagtcaagttttggttttcttttagagtgaaacacttggtaaagtaacactattcactgcaccgggctctcacgtgctgtgcgacattgctggagaccgtgagagaagagaagctggagtctcccaaatgcatcttggtttattttcaactttgttaagaaatgaaatatagaagatgaatgctaacacagaggggacaggaggcataaaccaggcttgtcttgggcaacccaggatgaggtggtcactctagtgaggaccaaagctcagcagtagttggaccatattgggaagagctatcaaatttgacttcagtagttacttagagcatagagtggttggggagagggacagcgatgtcacccctgacagtgtgttctaatctgtaaactcttccacacacttacctgaggctgtttatgggtagtgagcagaggaagctcttctttgaattttgtgctttgtgaatcttacagatgcttctgaatctttgacttttcactctccaggtgagaataacagcaccagagattgagtagctcttatttgtttgaagacaaattttaaacgcagagtagaaaagcaatagtcagttgattgatgagattttgaccccctccactgtattccttttagtgatttggtacaggccaccacctgctcttgcttgagcttcctacttgactttcgcaccacagccagaggggttatttaaaaatgtaaatcagatcatttcagcccttgctgaaaattctctaaaagacttcccatctcacatgggaaaacctttctgtgctgaaaaaagttctccttaaggaccttttaaaccctgttggccatggctcaccatatgcaktgtattttatattgccacacagtacatgccacacagtacacacgggtttgaaacagaacttccacgaatgatcctacctgtataacatgtgctgtatcttgacattttctattttctgtttcttcttttttattttttaatttttawttatttatttatttatttatttatttatttattttattatactttaagttctaggatacatatgcacaatgtgcaggtttgttacatgtgtatacatgtgccatgttggtgtgctgtagccattaactcgtcatttacattacgtatttctcctaatgctatccctcccccctccccccaccccacgacagaccctggtgtgtgatgttccccttcctgtgtccaagtgttctcattgttcaattcccacctatgagtgagaacatgcggtgtttggttttttgtccttgtgatagtttgctgagaatgatggtttccagcttcatccatgtccctacaaaggacatgaactcatccttctttatggctgcttagtattccatggtgtatatgtgccacatttccttaatccagggtatcattgatggacatttgggttggttccaagtctttgcttttgtgaatagtgccgcaatgaacatacatgtgcatgtgtctttatagcagcatgatttataatcctttgggtatatatccagtaatgggatggctggattaaatggtatttctagttctagatccttgaggagtcgccacactgtcttccacaatggttgaactagtttacactcccaacaacagtgtaaaagtgttcctatttctccacatcctctccagcacctgttgtttcctgactttttaatgattgcccttctaactggtgtgagatggtatctcattgtggttttgatttgcatttctctgatggccagtgatgatgagcattttttcatgtgttttttggctgcataaatgtcttcttttgagaagtgtctgttcatatccttcgcccactttttgatggggttgtttgattttttcttgtaagtttgtttgagttctttgtatattctggatattagccctttgtcaaatggatagatggcaaaaattttctcccattctgtaggttgcctgttcactctaatggtagtttcttttgctgtgcagaagctctttagtttaattagatcccatttgtcaattttggcttttgttgccattgcttttggtgttttagacatgaagtccttgctcatgcctatgtcctgaatggtattgcctaggttttcttctagggtttttatggttttaggtctaacatttaagtctttaatccatcttgaattaatttttgtctaaggtgtaaggaagggatccagtttcagctttctacatatggctagccagttttgccagcatcatttgttaaatagggaatcctttccccgtttcttgtttttgtcaggtttgtcaaagattagatgattgtagacgtgtggtattatttctgagggctcaattctgttccattggtctayatctctgttttggtaccagtaccatgctgttttggttactgtagccttgtagtatagtttgaagtcaggtagcgtgatacctccagctttgttcttttggcttaggattgtcttggcaatgtgggctgttttttggttccatatgaactttcaagtagttttttccaattctgtgaagaaagtcattagtagcttgatggggatggcattgaatctataaattaccttgggcagtatggccattttcacgatattgattcttcctatccatgagcatggaatgttcttccatttgtttgtgtcctctttgatttcgttgagcagtggtttgtagttctccttgaagaggtccttcacatcccttgtaagttggattcctaggtattttatgctctttgaagcaatagtgaatgggagttcactcatgatttggctctctgtctgttattggtgtataagaaggcttgtgatttttgcacattgattttgtatcctgagactttgctgaagttgcttatcagcttaaggagatttggggttgagacgatggggttttctagatatacaatcgtgtcatctgcaaacaggtacaatttgacttcctctttttctaattgaataccctttatttctttctcctgcctgattgccctggccggaacttccaacactatgttgaataggagtggtgggtgagagagggcatccctgtcttctttcagttttcaaagggaatgcttccagtttttgtgcattcagtatgatattggctgtgagtttgtcataaatagctcttattattttgagatatgtcccatcaatacctaatttattgagaatttttagcaagaagggctgttgaattttgtcaaaggccttttctgcatctattgagataatgtggtttttgtctttgcttctgtttatatgctggattacatttattgatttgtgtacgttgaaccagccttgcatcccagggatgaagcccacttgatcatggtggataagctttttgatgtgctgctggattcggtttgccagtattttattgaggatttttgcatcgatgttcatcagggatattggtctaaaattctctctttttgttgtgtctctgctaggctttggtatcaggatgatgctggcctcataaaatgagtcagggaggattccctctttttctattgattggaatagtttcagaaggaatgctaccagctcctccttgtacctctggtagaattcggctgtgaatctgtctggtcctggactttttttggttggtaaggtattgattattgcctcaatttcagagcctgttattggtctattcagggattcaacttcttcctggtttagtcttgggaggatgtatgtgtccaggaatttatccatttcttctagattttctagtttatttgcatagaggtgtttatagtattctctgatggtagtttgtgtttctgtgggattggtggtgatatccccttttttttttattgcatctatttgattcttctctgttttcttctttattagtcttgctagcagtctatcaattttgttgatcttttcaaaaaaccagctcctggattcattgatttttcgaagggttttttgtgtctctatctcctttagttctgctctgatctcagttattttttgccttctgctagctgttaaatgtgttcgctcttgcttctctagttcttttaattgtgatgttagggtgtcaattttagatctttcctgctttttcctgtgggcatttagtgctataaatttcactctacacactgctttaaatgtgtcccagagattctggtatgttataactttgttctcattggtttcaaagaacatctttatttctgccttcatttcattatgtacccagtagttattcaggagcaggttgttcagtttccatgtagttgagcagttttgagtgagtttcttaatcctgatttctagtttgattgcactgtggtttgagagacagtttgttataatttctggagtgctttacttccaactatgtggtcaattttggaataagtgtgatatggtgctgagaggaatgtatagtctgttgatttagggtggagagttctgtagatgtctattaggtctgcttggtgcagagattagttcaattcctggatatccttgttaactttctgtctcgttgatctgtctaatgttgacaatggggtgttaaagtctcccatgattattgtgtgggagtctgagtctctttgtaggtctctaaggacttgctttatgaatctgggtgctcctgtgttgggtgcatatatatttagggtagttagctcttcttgttgaattgatctctttaccattatctaatggccttctttgtctcttttcatatttgttggtttaaggtctgttttgtcagcgaataggattgcaacccctgcctttttattgttttccatttgcttggtagatcttcctccatccctttattttcatcctatgtgtgtctctgcatgtgagatgggtctcctgaatacagcacattgatgggtcttgactctttatccaatttgccagtctgtgtcttttaattggaccatttagcccatttacatttaaggttaatattgttctgtgtgaatttgatcccgtcattatgatgttagctggttattttgcttgttagttgatgcagtttcttcctagcattgacggtctttacaatttggcatgttttttcagtggctggtaccggttgttcctttccacatttagtgcttccttcaggagctcttttagggcaggcctggtggtgagaaaatctctcagcatttgcttgtcaagaattttatttctccttcactggaagcttagtttggctggttatgaaattctgggttgaaaattcttttctttaagaatgttgaatattggcccccattctcttcaggcttgtagagtttctgctgagagatcaactgtttgtctgatgggcttccctttatgggtaacccaacctttctctctggctgcctttaacattttttccttcatttcaactttggtgaatctgacagttaggtgtcttggagttgctcttctcgaggagtatctttgtggcgttctctgtatttcctgaatttgaatgttggcctgccttgctaggttggggaagttctcctggataatatcctgcagagtgttttccaacttggttccattctccccatcactttcaggtacaccaatcaggtgtagatttggtcttttcacatagtcccatatttcttggaggctttgtttgtttctttttactcttttttctctaaacttctcacttcatttcatacatttgatcttgaatcattgataccctttcttccagttgatcgaatcagctactgaagcttgtgtattcatcatgtagctctcgtgccatggttttcagctccatcaggtcatttaaggacttctctacactggttattctagttagcaattcgtctaatcttttttttgaaggtttttatcttctttgcgactggtcgaacttcctcttttagctcggagtagtttgatcatctgaagctatcttctctcaactcgtcaaagtcattctctgtccagctttgttctgttgctggcgagaagctgcgttcctttggacggggagaggcactctgatttttagaattttcagcttttctgctctgtttttcccccatctttgtggtttcatctacctttggtctttgatgatggtgacgtacagatggggttttggtgtggatgtcctttctgtttgttagttttccttctaacagtcaggaccctcagctgcaggtctgttggagtttgctggaggtccactccagaccctgtttgccttggtgtcagcagcagaggctgcagaacggcgaatattgctgaacagcaaatgttgctgtctgatcgttcctctgggagcttcgtctcagaggggtaaccggccgtgtggggtgtcagtctgctcctactggggggtgcctcccagttaggctactcaggggtcagagacccacttgaggaggcagtctgtccattctcagatctcaaactccatgctgggagaaccactactctcttcaaagctgtcagatagggacgtttaagtctgcagaggtttctgctgccttttgtttggctatgccctgcccctggaagtggagtctacagaggcaggcaggcctcctggagcggtggtgggctacacccagttcgagcttcccagcagctctgtttacctattcaggcctcagcaatggcaggcacccctcccccagcctcactgccaccttgtagtttgatctcagactgctgtgctagcaatgagcaaggctccgtgggcgtgggaccctctgagccgggcgtgggatataatctcctggtgtgccgtttgctaagacgattcgaaaagcacagtgttagggtgggagtgacccgattttccaggtgccatctstcacagcttcccttggctagggaggggaattccctgaccccttgtgcttccygggtgaggtgatgcctcgccctgcttcggctcaygctcagtgggctgcacccactgtcctgcacccactgtccgacaagccccagtgagatgaacccggtacctcagttggaaatgcagaaatcacccgtcttctgcgttgctcatgctgggagctgtagactggagctgttcctattctaccatcttggaaccacctacctgtttcttcttttttaaaaatgccggttgccactgacaaaactgatttcatgacttatctgtgagttattaccctcattttggaaaatatgttactatatgatctgggccttgtcaccctctcttccatttcccgtacctggccttgcctactttcccctgattacactgtgtccctgctttgccttagatatgactgttcactcttgccttctcctctttctgttaccagaaaggggtcctgatacagaccccaagagagggttcttggatcttgcacaagaaagaatttagggcgagtccagagtaaagtgaaagcaagtttattaaaaaagtaagggaataaaagaatggttgctccatagacagagcagccctgagggcttctggttgcctatttttaatggttatttcctgattatatgctaaacaaagggtggattatttgtgcctcccctttttagaccatatagggtaacttcctgatgttgccatggcatttgtaaactgtcatggcacttgtgggagtgtggcagtgaggaggaccagaggtcactctcatagccattttggttttggtgggttttagctggyttctttactgcaacctgttttatcagcaaggtctttatgacctgtattttgtgttgacctccagtctcatcctgtgacttagaatgccttaaccatctgggaatgcagcccagtaagtttcagcctcattttacccagcccctgtgcaagatggaattgctctggttcaaatgcctctgacatttctgcctagaacactgtttccctatatgatggcctcattgcttatttcacgtggggtcctgctcaaatgttttattatcagattttcctggctcatgcccatcctacattctccattttcttaccctatataacttttcattgtagctcagatgtataatatagttaatagatatttatgtgtttatctcttattaggaaaggcctatgagaataaggattttgttttttcagcactgctcactctctagagcctccagtggtgtctggcaccattttggatagccctttgatattagttgaatgaatgaatggtattcatagacagacttgcatttatcaaactctccaggaggttttctgtcccttgtctgtcttgtatcttgtgtaagtcttgactttgggtagagatccctgcagattctgtaaacaaggctggagccatttgatctaggaattctgggtcctgtgtaccttgagcatggactagaggggaatgttggcccagggacagtctgtgcccttggccccacagacccctgcccatgggtaggagcacagctatgggtgggccagagcaggctctaagtagagtgtgggcccatctcatccctttgtaatgttggcatcatgtaggagcaatataattatcagtttctacctgggggcctgtggtgaagattttggtgatcttttctatgggaacagaaacagggcattctgacatcatcatttctgcctgacattgtgtagctgtatcaggctggctttctggaatagctcagtggccaaagattgatcacgaagggtttagagctgtgaaaatgccccaggtaggtgttgtataatgctggtgcctggaccacagacagctgccttactggtttacctactgtagtctgcctttcattctacctgtccttcacactgctgcctggcagttcctcttaattcaagagtcaagtattattatgtgttatatttcctgctcaataagataatgcatgctctttgtaagaatgtttaaatattaggggaatatataacgtgagaaagtaggaatataatcttacctctgaagaaaaacacttctatcaatttggcatatagtttattttctttgcacatacaccaacagatacatgttttgtgttctttttgtttttattaacagttttattttaaaaagcacactgctgtgcatatttcttatttttactgagtaatgtatcataatcagttttctacaacagtacttactgatgtacctcgttctttttttttttcttttttttgagacggagtcttgctctgttgcccaggctagagtacagtggcgcaatctcagctcactgcaacctccgcctcccaggttcaagcgattcttctgcctcagtcccctgactactgagactacaggcttgcaccaccatgcccagctaatttttgtgcttttagtggagacagggtttcaccatattgaccaggctggtctcgaactcctgacctcgtgatccgcctgcctcggcctcccaaagtgctgggattacaggcgtgagccactgcacctggcctgtacttcattctttttaatggctgaattgtattctgttttttggatttgctatatattattgaactggacatggatcttggtgtcatttccaacagtgctgccacacatacgttttcatgtttgcatttgcaaacttatgtacgtatttccatgggacatattctgtgtactgattacttttttaaaatactcctttaattctgttacagccctgtttggagatcttctctgacttctggtcacctgtatcataaagtctagactagagcctagagccaatagaaacataatgtgagacatggagtcattttaaattttcaagtgtacacattataaaaaaaataaaaaggaacaggtgaaaatattttaatagcattttacttagccaagtgtaccccaaatattataatttcattgtgaaatcaatgttaaaacgtaattagatattttacacccttctttttgtactgaatctttgaaatctatgtattttacacttaaagcacatttcgatttggactatccacatttcaagggctcaggtaggcacaagtgtgtggctcctgattggacagcgcatgtctacactcagcctggtgcttacagcactttacaagtaagccatagtcagtcaaacaagccacattcagtcacatttagccaacctgcttttgcttctgacagccccacaaacttgcagtgcttccggtttatttttcctgcatcctgcccagttttttgggcagggtttctcagctttggcactgttgaagtttgggaccacataattctaagttgtgggtgccttgtaggatactgagcagtatccttggcctctacccactagatacaagtggcaccttctcctctagaatccccctaccccatctgtggtgaccaaaaatgtctctagactgagaaacaatgctttacggtgaatcagaaatctccacttatccattagggttgttttagccaactggataagcctactgtgacctacccttcctctgaacttgactttttatccagccagtgtggtaagtttttatttttgtgtatgaggaacaaagttaaaatcaaaatagaaaaagcgcctccttttgtagggttatcatttggtgttacatgctttaggaatactgtgaaaaatacaggaacttctgcagaaacacaaatgaaaatgatggaaagtctagaaagtaaagttgcagggaaaatgacctccatctccactacgacttgaaccagaaataataataataataaattgtgagaagagtatttgaggacaaatttataaccaacacaagggcctaaaaaccaccaaaatgacatattaaggtaaatagtgggacttttttcattggagaattttaagagaagatatcattgccttccaattatggtttcatatctgttctccccaaaggcatgtgtacttaaaacccctcttggccccataagaagattctttggtcctgatgagattatgtgcattagaatcacttctcctggaaaggagacgctaaagggtacttgaataaaatattaaaaattatggaggacataacaaaggccaatcagtcctttcttttccccagaccccataataggagaacatgggttatttgatgaaattaaagagtagcaaattaagtgctaataaaacgagatagtcacttacataattcattgccatgggaggtcacagaggcaaattttgtggctacattaaatatggggctggataattttatgaccgctaatgatatttttagcagtcaaggctgatactgtgagagaagaaatcctattacattctccagtagatggtttgcagggacctctggcaagaggtttctgagaagtgcaagagcagaccttgtgagttctaacctttggtgtactcaaaattggtttttaaggggaaagttcccaggcatcccattcatacctcagtcccatattttcttgtagagatccaaaagccctttctagtctgaagcagtggagaaagacattgcccagaattaaatcctttctggtctttgggaaccactcgacttatttatcgtatgccacccgtgcgtcaggtccttcgcttggagttttaaaaaatcttttggggacataaacatttggacacatcagtggcattctgagtgaaggggatgtactaaaggtggaatgcagagtttcatggaagcacgaagaagcaaagggatgtctcaacctgtgaggttcagggaaggctcccagagaaggtgacatttgaatcgactcttaaaggatgagcagcagttcactgttcgcaaagcagggagggcattcttggtagaaggagcttgcagcatgcacagatccagagacagcctggcataatgtgtcagggaactgccagtagtttaggaaggctgcaccacagaggcagaggagcagtgagggaggagctggggcttgagaatgaggaaggagccagatggtgaaggaagaggcttgtgtttgcctgagacccctctccaacagtggtgccagtgtttccagtggcgacagtagtggtagtggtgcgttgggagtagagaatgggaaggacttcaggggtgtcctgtgaccgataaaggacagcctgtcaaagccttgccccactgagtaataggcctacctctttttgatcacggtcaacaattagttggcagtgagtcttggagttcacatactcttcactcatttttctatatctgcttgaaacagtctttaccatgaaccaaatcagcattatcaatcatctgaggagaaaaaaaaaaagcctcttagggctgggtgcagtggctcatgcctgtaatcccagcactttaggagggcgaggcaggtagatcacttgaggtcgggagttcgataccagcctggccaacatggtgaaaccctgtctctattaaaaatacaaaaattagcctggcgtggtggcgcacgcctgtagccctggctccttgggaggctgaggcatgagttcgtttgaacccgggaggtggaggttgcagtgagccaagatcgtaccactgcattccagcctgggcgacagagagactgtgtctgaaaaaaaaaaaaaagaggctcccctgcgtttgagtagggggtgtttcttacaggtcttagataaattgggacgaagtctagagtgtctggtctgattttctcgggctctgctagaacaaaaacagcccttgagtgggaaagcagaggcagatttcatcggcctgaccccagactcccattttctctgtgaagttggctcagcaaacaagcaagaaaacatacaatatctttgaggagcaggagcagatggattgaaatgttaaaaatctggtttgttaaatgatttcagctaacaaaataattagagagaaaaagaagcacccaaactctcttccttcttcagtgaaatttaaataagatcattattaatcactcagagtccaccttgcaatctctatacctttaatactgatacttttaagaagaatgaaatgaaaatgagtgagagaaagaatgtcatctgtaaacattagtttagatgcaaatacttcaatttgtattgttacatgatacagtatgtgattagcagttttcctcattgcattataaagagttttgtaattagtgcattttttctaatggataactttttttccacagtactcttttaaggctcttttaaaaacatggaattgctggagagatatagaagtgaggttagttatagaaggtaaataatgttcatgtccgatttaccgtgaggccacctatgtttataggatattggtggatgaagttgaaatatgtgtaccaaacactgttggatgttagacacccaaagatgagtaacatcatggctgacaatgtactaagtacaacgaatggtttcaccaggaatccttgatgaattgattacaagttctgtggtagagatctatccaaatgttagctctgtctggggagctgacagtgttttcacaacagctaatatttagactaggtctgaaggtagaaattacagttaactggaagagaagagagagtagatcaaggtaggagagagcatttcagaacaaaagcaacagagatagctcctgaaactttaaataatttgttttttctttttttctaacttctgttatatcagtcaatgttgttatttctaatacattttgaaaaatttttctttgaagaaagaatgggctgtatcctgtcagcatgcagtaggtattaatcttgccagtaagcgggtagtgagcacagattctgtaagccccaccattagttcacttaagatttgttaatcatttgctctcctgggctggacactcaccagtaagtctttgctctcagaggtgaggtacgtggcatgggtaacacacatttcccacgtcgttagacatgtctgtgtgatgaatcaatacaggttcttccagttccaaatgtataggctggtacagaagcaattgtggtttttgcctttgaaagtaatggagtgatttkgcatgaagtatgccttttgttgactggtcttccatcaataaggttgtttatttatagttgtacaaaaaagaaatataagctttaaaaaaaggttgatgtcaaatgataaatgtatcctttcaaggaccatgtaaaaataggtgactatatttaatgaaactttaggtttcagaaagtgtttttctgtctgttttagaccttagctggatctccaaaatacaagtgaatcacccggcagttctgaggcgtgcggaacaaatccaggctcgcagaaccgtgaaaaaggagtggcaggtaagggttcttcttgagcattctgtgcctgtattttacaatgcatggtctcttccctcaaggccacaatattgaatttcactcaagatgcatctaaacttaaaagattgcagctgtccatgacttattttaataattcatatatgatgatgatgggttggagaaagataacacatttatccaaacaagttaaaatcttatcactcttgagtggcaaaaccgcaaatgaatttgaggcatctttattcatgagtgaattaaatggcatattttctcaacacatttattcagttttttagacatgccttctttggttgtcttctgttttaattttaaagccctaacatctaaacttgatgtgtccactgttgaggcccttaggtataagagttgacctttcttgaccatcatatttaccttactattactttctataaatcatttttcaaaattccaaaaatgatgtttcgtagagtacttgcggtcagcattttcttcagtgtatcccaaccaaagacgtgctgtgtaggattaaagggaattcagagttcatttcacaagtgagacagaatactgtgattgaatccttgagagtgatagttcacgttttgctcatccttagaaatattctggttgaaaaggtaaaataaaattcatcagactgagttgtgaaatatgaatattgttttaaaaatggaattggattaaattgaaaaaacaccaaaaaacttggaaacttttaaaaatgataatctcatcccagatcccagagcgggaggtaaaatgtaaggtagaaaccttctttcggagttcttctttgtcagggtggctctgatgggctctccctttggctgagatggagtagtcagaagtggggagacatgggctaataggggtttcaatttgggatatctgtgggagaaaaaaaatgtttaagcctactcttcctcccttttattttgggcagtgttcaccttgttagtggctcttgagctgtgtttatatcatgtatcaggatattccattgaacagtgtaggcataagatattaacacccatacttgtctaatgattctctactaaccacctgggttggaggttggttggtttgtttatttattaaatttactttgttttcacttttgtttaaaccaggctgcttggctcctgaaagctgttacctttatagatcttactacactttcaggtgatgatacatcttccaacattcaaaggctctgttataaagccaaatacccaatccgggaagatctcttaaaagctttaaatatgcatgataaaggtaatgttgttgtgtgtgatctatgtggtgtttagtgcttacaatactgattactaaatcaaagacgacttaagatacagctgctaatgatagcggtgatagaatccatgatagaaactcttgctgtgtatacatagacagattcttctctgaaaaacagcaggaagagaatctgagtctttttttttttttttttttgaggtcagttctttccatcaatggattaaaatgcttggtagagagtgactttatttcttttcagttcttcagttttggaaaatttctgtttagtgacactgaaatactctttctgattccctagccatacgtgaaaaagccagtctcattacttaataatcacatctcatacataaagtattttctgtgagtatatgaaatacttttgaaaataaagtgcaaatgagaaatatagcctgcttatatattaggttagatctttcaaaaaaagtcatattcactgccttagtatacatgaaaagaaggacttttctagagttgccataagtttagaaccttagcattttggagatgttggacacctgtaagaattgattcccttgttttctaaataaagaaacaaagacctggaaggctaagcggcattcccaaggctacacgtcttgttacttgctgggctggttttgggagccaggtctccttcccatggagtatgcttcatggcccccgagtgcctatctgctgtgagtgcaactggagacgttgaattggcccaatgcaggtcttttatcccaaataaacacgtttaggtttgtaggtaacatacaaacctaaacaactctacggcttttgaaaagtatttattatgtttatttcgtgttggccataaaaatatcaccttatttattgcacttaaaggtaacaacttgatgtaaggtcttatgatattgctttgttttatagtgactatttgaattctaaattttttaaaatttatgaacttatttcttaaaatcagggcttccgtttcagattttattatttcttgcaaaagagggaataggattagttaaatgtcatttttgtggtaccaccctctaaattgtacttatatttgtcttcatctgtccttcttcaaactgtcctttcttcaggtatgtcctatgtgaatgctctgtaaatatggattttgttatctacatgaaatatttgcatttagtaatgatcaccaaatttactatttagacatttttaaaaaacagtactatgttaatctcaaagatgagtatatcaaacttgtttttatgactttaacgataagaaaataatccatattgtcaagaactagaagggaatgtggaaaataaaaatcttttaatttattgcagtattgtgggggaattatttttttctcatttgatttttgccagtgttgcgatataaataataattaaaagcatgttgtatgagttgaacttcattgaaagttggctattcctattttttcttgataggcattactacagcygccgtttgtgtttatcccgcccgggtgtgtgatgctgtaaaagcactcaaggctgcaggctgtaatatccctgtggcatcaggtaaaatgtgttgtggcttttgttgttattttttaaacaygtttccagttcttcatacaatggggtattatatgtaggtttgtactatgatttaaattagtttatgtatttaattagttgtatttattcatgattttagtatgtactaattgcttagtaagtggaagacatttattcccaacaatatagaactgtattcctatccttaaagaaactcagtttaggaggaatagtcaggtaaagaaaaaagtcataaggcatgacatatagtatatatatatatacacacacacacacacacatatacatactatatatgtatatgtatatatacatattaactatatatataactatatacatactaacacacacatgtatgcatgttctgttatacatatatatgtaaaatataataataatgatatgcgggctggggacggtggctcacaactataatcccagcactttgggaggccgaagcaggtggatcacttgaggtcaggagtacgagaccagcctggccaacatggcaaaaccccatctctactaaaaatacaaaaattagccaggcatggtggcaggtgcctgtaatcccagctgctgggaggctgaggctggagaatcgtttgaacctgggaggcagaggttgcagtgagctgagatcatgcccctgcactccagcttgggtgatagaccaagactccgtctcaaaaaaaaaaaaaaaaaaaaaaaaaaacaacgatatgtgcaaaatgtgtagttgcggttctgagcagggaatgatatattctgcagaggttggtgacaccaaagtaagagaaagcatcgtcgtggagataattgcattggatcttaaaggatgaggaggagttcacagtgttaataaggtagggaaccacatgttagacagaggcactagcacgtgtgaaggcacaaagcatgttcagggaactggaaaaggtttgctgttgttgactacaaaggcagggctctgaagacagggcaaagggggagatacaggagttgaagctagagagggagatcagggcagaattgcagaggggatccatgccatgtgggggcatttggcctgtattctgatgatagggaagacactgaaaggttagaggcgtgacgtgatcagcttcatggcatagtaagttacctgatggtactggataaattagaaaaggagtgaaatggagttaggggagacttgtcacagtacatgcaggacctgataaaagccacacaaaacctagaagataaaggagagagtgcattcagaagtcactgacttcagatagacacggtaggacttggtatgacagaaaagtctttaaaacattagtttggtaaatgtgtatctgtgtgtatatggatggatgaatagacagatataaaattagattctagttttaagagatgttagaggaatatcctgatgctttaaaaagggagtctaggccaggcatggtggctcacatctgtgatcccaacactttgggggggctcaggcgagaggattgattaaagccagaagtttgagaccagtgtgggcaacaaagatctctacaaaaaaataaaataagtaaaaatttaaaaggagtttataaaggtcattagcttattaggaatatattaaaagaaacatggtgcacagtatttatatagaattgatttatgaggattcctgaagtatttggcagctacacttgtatagaccttaatttttcatcagcctcagtcagttcagtttttgctttaaacaacagagaaacatgctttcctctaaggtaacagacctaaggaatttttttaatttttattttttgagacagagtctcgctctatcacccaggctggagtgcagtggcgcgatctcggctcactgcagcctccgcctcctgagttcaagcagttctcctgcctcagcctcccaagtagctagggctacaggtgtgcaccaccacaccaggctaatttttatacttttagtagagatggggtttcaccatgttgaccaggctagtctcaacctcttcacctcggatgatccgctagccttgacctcccaaaatgttgggattacaggcaagagccactgtgcccagccccaaggaatttaatatcaaggtaacatgacaggtttttttagaaacagggatggagagttaatgatgtgcatgtaaaagatgttactatttttcaagagtgtagttgtgttttgtgttttcattttcctcttatttacacttggctctgctcttcccaaccctgcccctgcctcaatttggtggactaattaggtgtgttttcctcctgcattctcttttctttatgctcatctgccaggctggttgtttttaacataggcagtgggaggaacacataggacagtttgtttaccacagctaaagaggttcatgagagaattaatcaagataaatcaagggtaaatgagtaaatcaagatagctaacttgatcaagatttggacccagaactagtgtgctagataactagtgttcattaagatagggctaccactactattttatggctatcactgtgaagataaaacatctttgctggttacttaatccaccttcatgagcatctctgcagcatcttaatttcaggtcttccagaaaatgatatttgtcctaacactaatatgagagaacattcaatttcttcacacttatgcataagtgatgttcttaagtgtcagtgcattggtctttaaatgctgatgtttgggggtttggaattctttgatgaactactactgaccaattgaaatttgttttcccctcccccccttgcttactttctttcttccctccttccctctttcttcatttcctttcttaactctattagtggccgctggatttccagctggacagactcatttgaagacacgattagaagagatcagattggctgtggaagatggagctacagaaatcgacgyggtaattaacagaagcttggtgctgacaggccagtgggaaggtaggtgcatgcttttacctaagagagtttcaccattcttccctggtgaatcagatgatgaggtaagatgtggtatgttttagaggtcactgttctaggtgacaagttagtagatcaaatggtgagtttaggagaaagcaggctaagattacccatccttgtgcccctcataaatctaggcagttgcctacctacatgaacttttcagatccttttgagtgcttaggtgaatagttacttccatgcaatagattcataacttttaaaacaattttattttaccaacatgctttttcttcagaagggaaaagttactactattctatactgttttgttactcaatacatacttcactccaggcaagtcttttatgcaaagtttatttgaatatattggaggaaacttcccttttttatgttaatttttgcagtctttaaaggtatgggattattaagttgactaagtttatttttacttctagcattcttagacacagctctgatgactatcatgaaattaatgattcactatcacgtcagcatacactaagacattgccctttccagcaacaagcttttgtttttttaaacagatattaaagaatcaaatagattttacctctgtcttaaatatattttgtgtactaaagatgaggtcattggtagctagaaaagtaaaattctctttcaaaaaagtcattataataaatagtttaaccaaaaatttttaatgaaatyacaagttaaagccaggatagtatattgtctctttatatatcaaataaatggcatattttatactaattatggaggctattcccacactcctttaaagtttaaataagagataggattttatctcttatttaacctgcttattggacttgcctatttctcatgggtattttcctgtgactgtttctatccatctgtatctgtaaagcctatgtctatttgtgaagcctaattccattgattgtcaattatgaattgcttttggttatgaagtagcaaatgttcagtcagtggtttaaaccctcagtatttattctcttatataaagtccaggggtaggtatttcaggggtgtgtggcagctccacaaagttcttggagacccgggctacgtttatattccagttccaaagcatgtggcttctgctgttaatgtcaagggcacttcattgtctgagatggcttctgaagctccagcaccttacactcatctccwagaccataggaaagaaaggcttttctcatcaagtctcacacaacacctttgtttattacacctttgcccgttggcctgagctgagtgacgtggccattcttggctgcaagtaagctggaaaatagagtttttagcttggaatattaactactttcctgtacattcccatttccattgcgttcaccccacygccccccaagttccccattaatactcatcaacatttataattcttgccaggtttaaactcttgacagttcacaaatatctttttgtattttgtgttccttttttgtgattgttcatgtgtgtgttttagccaattacagtcattctgaaaaggcgtattttaaatagatatctctgttcctatatattaattttgcttatctgcttttagtcacggatttcactaagatttaaggctagagtaaaatgaaaaagtgagtaagcgtagtatttaaaacaaatctggcaataaactttatgtgatttagttgtatacaaacctatatgtcctttatatcttaagcaattgtagatgtagaaattgggtttatattataacttacaccttttattaagcagttgtggatatagaaatatggtttatattatgctactaattggaaaataaaatacaataggagatgggttttgatgtagctgactgccccttaatgaactaggaatggttgtttttaagaactgataatttcccaataacaggcgtttatgcaaaatgtaatgacagatctttgtcctggaccatacttttatattaactctttttctagtgttaataacctcttgacccaaacaaattgaaaaggaacatttaatactagaaatttaattctaaatagaaacctgaaatgacttaggactttttgctgcaatattttgtcttaattttgattctcaatttgattacatattgtatttttcagtgtcatgttttaatattagctgtttattaaaatatgagcataaaataatttcttggaatttgtggatggaaatgtctatcaagcaattgcagttttaaatccagggccctctcccttgtgcagtgaggtttgtaggatatttggtaaagcacaatagaaagaaccccattttattttttaagttctggggtacatgtgcagaatgtgcaggtttgttgcataggtaaacgtgtgccatggtggtttgctgcacctatcaacccatcacctaggtaggtattaagtgcctcatgcattagctattttccctaatgcactacctgcctccaccctcccccaacaggccccactgtgtgttgttcccctccctgtgtccatgtgttctcattaagagccccattttttaaacctggcccttcagagtggtcttaaccatttctcatggatgtgagagtccacagtttagggtatgaattcgaggagactggagtttgggggtgggggaggtttgatattcctctctgggttctccttagtgaccatttaaaatgtccactttcctgaaatttctaacttttccaccctccttgaagctccttcactgttagcatatgaactgcctcctacttctcagagaaaataaaatcatcagacaggagctccctccaggtccttgcatcagggctgcttttctttgcttcttcctttgctccttcctcctaaattccttccctcgactgtgctgtggctctcatctccccctgcattttcagaagccctgctctatctattgggcattctttcttccrtgtcatcagcctttctgccagctcattcccattaagcatttagacatactcaagcttttcttagccatttatgaaagaacctacatgctggctttccttttccttcatccccagcaacgtcctcctttcttctcttcccttcatgactaaaattctgaaaagaaggcccgatgcggtggctcacacctgtaatcccagcactttgggaggctgaaacaggcactttgggaggcctcatcacctcttgctctgctgccgccctaagctctggttccgcagcaacgctctggagtgaggcgtcctcctcacttgaggttgggagtttgagaccagcctggccaacatggcaaaaccctatctctactaaatatacaaagattcgttgggcatggtggcacatgcctgtaatcccagctactctggaggctgaggtgagcgaattgcttgaacctgggaggcagaggttgcagggagccaagattgcgccactgcactgcaacctgagggacagagtgagattccctctcaaaaaaaaaaaaaagaattctgcaaagagttatatttatttgtttgtcttgagaagttcaaactaatatactaatgacctgtcatctcattatgtccagggcatactccccagttgtttattcagcattaccatgcaacatatgacacagcagactgttccttccttctggtaatgctttgttgttgtggctttggtgcctacattcctgaggtcttcctttctgtttctgattacccctgcgtctcatttgcaagctccttcacctcctctgtcatccctgaagtgtccatgtttctcagaatctgagaactgtggttctcagattctgtcccagtgtgacttttccacaaccttggtgtgctttcctttggaaacgtcatgtccttgctgatttcagttacattccttatggcaaagacaaccaaacctcctgagcaccaggaccacctggacccggggccacctgctccagaactcgtattccgttgtatcactacaccatgttgcattttacccatcatttacatataagtagacattcaaatatcactgacccttgacaaaatcagagaaatatagctattttggaaataaatctattaggccgggcacagtggcttatgcctgtaatcccagcactctgggaggctgaggcaggcagatcacttgagcccaggagttcaagaccagtctgggcaacatggcaaaaccccatctctgcataaaaaaaaaaaaatgcaaaaattagcctggtgttgtggtatgcgcctgtagtcccagctactcaaggttgggcctgagatgggaggattccttgaatgtgggaggattccttgagcctgggaggcagaggttgcagtgagccatgattgtgccactgcactcataagccactgcgcctggcctaatagatttatttctgaaatggcctgagcaagagagtgagaccctgtctcaaacaaacaaacaaacaaacaaaaactattaaaaagtgtttttatttccctgactttcttaacaatttttattaaatacaatttaattttttcttgattattccaaactgtttcattactgattatattatcccagaatacagtgatgctttcaggggccagtggaatctctgagatgattggcctcatagctcacagtccagactcttgtgctttttgatttatgtatcttcttatttgttactgtttttttgcctactccttagtggttaagctttttactgtcagatcatgttgagctcgtgacggcacactgtccttccctgccaatccttctgtcactcctgtctagctggacatggaaacgtggataactacatttctcacttaccaccatagttttaaccctatagggtgtggcatgtattgtaggctctcaaaattacaatacctgacaaacattttcaaatgatttgccccagctgctttcctgacaggattagcatatccccctgggcatttgtgataaaagaattgaggtgtgtatgtgagggaggaataggcttctaaatggggaaaatccctccaggtgattttgttctccttccccaccagtcccatgtccttattaagaagtactaactcaggactctttcttcttcttcttttttttttttttgacataattccagttcttagttgcatatactttaggtgccagataatggaaacattgttgaatttacatacaacaatgtacgtaaattcatacattgaatacatttatatattgtatgttttattgtattactaatactaatcagttgattaattagtacatcttgtatttcctgtatgtttctatgccgttagcctggatctgtagttagttgtaaacaggagagtttgatgaataaagtgttattctggtgaatttagctaagaagtgcatctgcttcctgtgctcttgagaaaagaagactttcctctccctgggatggctgtgctctctgataaagatagcatccaagtggggacatcacccggccaggcagccaggccacccagtcattgctggtgtcacagtcagacccagaacaaatgcaccatggggtaagaagggaggacagtactgggaaagcaggaatagttgaaagctgcatctttgcattagacagatcttggctggaatcttggctctaccgtttactcttggacaggttcttctctgtgctttctgttccttctatgtaaagtggagataatgacatctacttcacagggttacaatagggaagaaattagataatgtatgtaaaatatcatcctgttgcttggcccagatgcagccctccttgccagctgcagtgttgccttctctttctccctcctcctgccccgatgatggtctgttgtcaagggaagtgacacatagcacatgtgttaagtgaataaagtggaactctaaagatttgggttttagtctttatgattttgataatttatacctagaccttgggtaaacacttcacttctctctgcttccatgtaaatgttacaaatgaggggctaggacataatgatttttacaaccctttagagctataatgatctttaattttatgtttagtgttttcattttcagtgaatattattcccatgattagtacatgtaatacagtatttcttaatggtggtgttgaagttgacatctaagatgcactccttaaacagttctttgaagaaagcattcaccagaagttgttcatcatttcataaatcttattgagcaggttttaaaaattgaatagtttccatgctcwgtaaatatacagaggtgttcattttactttttttatgacctctttctgttgcatctatttacctaatatatttaccagtgacagggaaatgctatcagattgcaccttgttcaggaatctagctccatgagctgaggacctggagctggctttactagctttgggagactcattccacactggagcaccagcagacgtagttccaaaggtggctaggattgtctgacattctgcagcatcttatgttcaatgggcaattggaagtaccattcgtctcctgtatccagagcctcatgtacttttcatctccttcaattgtttacccctgaattgctctcttaaatctggcctgtgaagtacatacatcatggctatcaaacattttaggataagagaatgaaatatcagcaccaaagtcacattatttttcattttcttayatgaagagaatcctaaagaccttgaatcagggcaataatctatttttcttatttgctgatttttacacaagaaggatggtagaaagaacatctcaaaaataaattggtatatttcttttatagagtgttaatcatattttattagaaaagcagtctctaaatcgatagctactttttggggaggaattacataatctataatttgtgatttctctgttttggaagttgtatataacagaaattctggaaatacgacaactgtatgcttttatgattttcatttttatgctacaattcttcaaaacttcagatactattgataaaaatgtgcatcttatctcttgtaggttattataatatctggtgtgttagctcatctctgccttagtcttacaagattaattagttgctttggtggatgaaactgtgttcttgaacattttgtgacttttttagtttaaaaggttgctgtacaattttatattaagtgttttactgtacatataattatcttaagagttattttcaggccattcttgtgcagtgttgaacatctttctgatactcaaaaaataattgcttagatatgttcgttaacaattatttttaagtgcctttgaatagcaggaaatatagaaggaaatatactttatgacttttagataggaaacagtctttaaacgcttggattcttacttaaatcataattttatacatataagttttattaacagagtttttgatgtctagagcagtgcttttccagaatacttagcagattgccagccgcttcaaaattgagaagataccgtcctttcaggtggatcctagagagaagaaagttaattttatttatttatttataagtgtttttagctttttgagggtttttaaattttcatttctttttttaaaatacaccattctatttttgaaaataatgttaagaatgagctcattaaaaaagaaaactgaaaaaaaacaggtacacccacatttccaactccatctctcttttcagactgttcaagatgtacacatgtacttkgtatatctgtagacctgattctttccatgttgttttcagaggttgacaccaaactaccaagtagatatttatcctttggtttaaattcagattccattccaccaaagcaacatgaaaaaacctaatgtctagttttagcttctggggattacattcttcaggtaagaagtgaaaatagagaataaatggtgttaccatctttattcagaaagtcattatttttagcaaaatggggccaaggcagaaaatccaggttgtaagatttggaaaaaggagtgtccacaccatgggacatgtacagattgatcactatgacagcagccctttatagaggtaataatgttgtcattaggttgtgacaattctccagagacttcaacagccccsrattaataacatctggaaattgttcagatgacataaatttctgttttctgttttaaggcttccattgtgcctttctgtggcatctgccrttgtttttctttttcaaacctttcaaatcaggaaatatacataaaatacaagattattttcctcacrtgtgctcctaggctcttgtcttgatagccagcgttaccaaatctatcaggtaaactgctggccaactggtatgtctgctggaatttctggaggtggaatagcaaatgagttcatctggcaaagagagcatctgaaggtccatgcagtcttggcaagaaaacactaagtcccacacataagacagggatggggagtttttcrtcactgaagaggccatctttakatctcaactcttttttttttttttttttttttttgagatggagtttcattcttgttgcccaggctggagtgcaatggtgcgatcttggctcactgcagtctctgcctcccaggttcaagagattctcctgcctcagcgtcccgagtagctggaattactggtgtccaccaccatgcccagctaattttttgtatttttaatagagatggggtttcaccatgttggccaggctggtctcgaactcctgacctcaggtgacccacctgcctcggcctcccagagtgctgggattacaggcgtgagccactgtacccagccggatctcaactcttaaagataattcaggaaccattgctaaartgaacaaggccagcagattttggagcacagtcaatcttcagtgagggcagatgtttcctaattaaattcctgaatttctttttggcttctgtcctttcttcattatcaaagtaccaaacagtatagcacatctggtctcataggaagacagcacytcstgtagcttcctgcgatctgaccaggagagcaggactttttcacaattggcctccacatctgccacgaatgatttctcctctgaaaatagccataggatcccaccgtgtagcctggtatcccarttcttgttcagatagtagatgcaggtggtgcagcagccatcgttgttgaggtgtccacatgatgaatgtaacctattccatttttaagatagcaagccaccattgccttggacctctccttgacatagtattttcccagtggctcctgcactagaggactagcctgtcagtgagggacaggaggaagccaatggcctcgcggcccttcttgttgctcccagaactgtggggtgaactgatcaccccacagttcaccctttagagacactgcacacatcccagccagctggctgtcycgcagggcccccttgcaatgcagctgtttaatgtgctcctggatgcagttgyccaccacctccttgcccaggaagttttgcgggtagcagaagctgacttcccgcagacagcgcatgatgtactctagggaaattttctccaattcctgcctcatgatgtgtcccaggggcatttcacgcatagtgcagaagtcggggaccyccagcgtgcacccagagagggaaygatgtatgtgatgtgaagccaaggtgtggggagtgtggccatggtcccragccacygcagtcagtactggggacaggggaaagttgctcacaactctcaggagaagggatctgcgttcagggatcagtgggagtggtgcgggactccacgatctagtgctggacttggaagttaatcttaaataaagaaaactaaaatgctatcgatgcaagttcctgctggcgtgcggggacagcattgcagaaggtagggccagttgtcaacctgatttggatgctgtttcaaacatgcagtctgacccctttccctcctttccactccttggatccacactctgatgcacacaggcctttctcattgtggccgagtgctctgattcctgtcagtgagcactccactgacacagcctcacttgtttttcagctgggaacgacaggcagaggtcaggttatgacctctacttcttctcagtgtggcagtagtaggagggatgcggggagacaaacgggagacaactcttctgctagttgtgccactatattgattaagcatctgcaatgtaatatatcctgggcttctagcacacccactttcactacccctgaaaacctcattataagtcaaaacatttattaataggtttttaatgtgacatcactatgccagccacttctctggtgtatgtgttttgttaaattttgcattattctgactaatttgcagtcgtggtattggaattccattttcatttgtcaggcatctttgataatagcctaccaaattattatttttctaatatatggcaagaattgctttttttataatagagaatttccagttttcataatgtttgaatttttaacaacagacatatattacatgtgaatatgtaagcagaaaaaatagtaagggctctggagaataaggtcatgatgtttgcaaatatttaactataaggacatttactgaagtattacttataatagcaaaaaatctggaaccttaagtatccaataacaggaaaatgattgaatacattttttatgtccatgtgatggaatattgtgcagccattaataattgctccatagacctatatttattaatatagaaatatatcaaggatatattgaaggaaaaaagcatgttacagaataatatgtaccatatgtaatcacttttttttaagttatagaagccatagagtgattgatagtctaaaaagccctcctgtaagaaaaatatctggatgctaaattacaacaaacatatcaaattattttttaacttttatttttgaataattttaaacttacagaaaagttgtaaaattggtaygcaaaactacagttttatcactgagattctccaattataaagtgctatcccatttcctttttttgacttatttcctctgtgaagtgtgtacatacatatataaattatgtattatatacatatttttctgraccatttgggaataagttgcagacctgttcacctgttacccttaaatacttcagtgtgtatttcctaagaacaaggacaaggacagggacactcttgtaccaagccacagtactgcatcaaaatcrggaaattaacattgatraccatayggccattaaatgtacagattgttcagattttgcagattgtcccaatagtgttctttattaggtgtagtatcagttgtttcatatctctttaatattctttaacctaagaatactaagaacagtcctcagtcttcccttgtctttgacgattacgggcctgttrttttgtaaaatatacctcagtttgggtttgtttggtattttctcacagttagattcaggttgcacatttttggcaggtataccacagaacttttgctccgttcttctcaatgcattatttcaggagtcacaagatgttaatttgtcccattattgatgatgttcctttttttacttggcaaagatggtttctgccaagtttctccattgtaaaattaataagtattttgcattttaataagtaattaatatagattatgaatggagatattttgagactatgttaatatccttttcctcwtctaacttttattcactcttttagcatccattgatgattttttcagctattactctgattttctaattctgtcatttcttctatacttaagagttggcattaccaaatctgggcatgatgtggaaccctacaaagccagatgtggtattgaggtccttccctcgctcccttcctctgtccttccctctctctctccttccctcccttccttccttcctgtttgtaagaactcattgattcttattttactcaattggttataatcctttaccatcattatttattttgatactcaagtagtcccagatttggccattgggagtgtaaccgctcagtgggttcaccttgcctgctgcctacacagagctagtttctcaagacggaaattacagtagagaaagagtaattcacacagagccagctgtgtggcagaccagagttttgttttattactactcaagtcagtctccctgagcatttgggcatccgagtttttaaggacaacttggtgggtggaggaagtcagtgagccaggagtgctgagtggttggctaggagatggaatcctagggaattatttgaacctgtcctcttgtgctgaattagtttttgggtgggggccacaagatcggatgagccagtttatcgatctgggtggtgccagctgatccatcaagtgcagggtctgcaaattatctcaagcattgatcttaggagcagtttagggagggtgagaatcttgcagcccctagctgcatgactcttaagccgtaatttctaatcttggagctaacttgttagttctacaaaggcagtctagtccccaggcaagaaggaggtttgttttgggaaagggctgttattatctatgttttaaactatgaactataaactaagttcctcccaaaattagttcagcctgtgcacaggaaggaacaaggacagcttaaaggttagaaacaaggtggagtcagttaagttagatctcttttactgtctcagtcataattttgcaaaggcagtttcgggacctgcttcacactggctcctctatcctttttatgttcccatcattctttgagagcttccttgctttcttgtaatagatgtttcaggygtatctttgactttgtctgctccagctttggaatcagtcatttctccaaggagctcttgctccttttattgattaactgtatttagaaaccaagatctgggtgctaggtataactcactgctattgggatgttattgtttctaggccctcttgtcagacagatctagtaaatacatgaacgtacacatatacacagcacacacatagaaacacacattcatttttatttatttatatatcagtctataaatctgtcttagaacttacaacttcacactataacctctattacactccagcattgcatggtttattcttactttccccttccatatttataccccttcttcccgtcagtgagatatcttgctcccattatccattatcttcagtatattcatcttttttatcaatatttgcctttttatcaattgctttgtgtttgacaatctctagaacctgcgggttgtcttcctggctctacttgccaagtcctccccaacccctakaattttcagtcctcgctggtaagggtgaccttcactttccccagagctgactgcacgtccccctcacctcgcctccatcatgttgccatgatgtagcaacatgcaggccaagaatttctctaggccccagtgacatgggggctaggtttctctccaccttcttggcagtgtgtggctgagaaaatccctgctctcccttgtctgtggttgagagctcccaaagatagagttcagaatcatctttctaaatcaacaagaggctctttcatcttaattataacagcttaaacttttagagtaagtcarcgtttaccatcattttacgtgtgcttattatcaaaggtggatctgaaggaaaaatgattgattaccttcctaaccgttttaatacttttatatttattggcagaatttgagaagggtttgagctgtaaaaataaagctctcctatctaatcttgaggagaaaaatgaagcttggagaggttcagtaactttcccaagtaacaccactaatcagcggccaagcaagggctgagaagtcctgattcaaatatatgaactctactgtagcaccataccctggttttcttcccatccagggggctaaaagagcaatttagagatcatttttagtgtattatacaaaatttagtatcttatatttctgaattaccttggaacaaagagcaatttagagatcatttttagtgtattatacaaaatttagtatcttatgtttctgmattaccttggaacttttcattttatgcagcttttttcccctagaagaatgaaaaccaggtcctaggattctaatgcccatctgtcaagtgagtagtttgaactagaagggagttgacatccttctacgttctgagttttgacraatctgttgctcgaagcactgcaatgtatttccctgggaatatgttgtaactgcagtgagtgtacacrtgcatgcatgtgtgtgtgtgctgggatagaggcagaaaattttgaggaaatacagttttattccacgtatgaagacatgactcctcctctctgttctataactgacccacagtaagatttggagcaagtcatttatctctccacatctcacttttctttctttcttttttgagatggaattttgctcttattgcctaggctggagtgcaatggcgcaatctcagctcactgcaaccttcgcctcccaggttcaagtgattctcctgcctcagcctccagagagtagctgggattacaggcatttgccaccatgcctggttaattttttgcatttttttagtagagayggggtttcaccatgttggccagacttgtctcgaactcctgacctcaggtgatccacctgccttagcctcccaaagtgctgggattataggcgtgagccactgcacccagcctacatctcatgcttcacatgggaagtgtggaggtaactgcaaattgtctcacgatggatggttaaatagcgtgtggagaacactgagcatttttgagggaagaggctttgaaaacgtaggggatttctcatcctttagagtaattattcctcatgaaaawttttttggaaagggcatctgttgaacttattgcttcacttgtaatttcctctgtgtatgtggtctagcagcagttataataactccatacyccaccattgtcctttcctaccaacataggggaaaacctgctcattcgtttttccattgtttggcttatttgtattgaaaggaaagtgycagctgagtttgttaaaggacataatttgagattgactgggttacatttcagccatcaagccactttgattagcatatgtcattcatctagtttctgaggtgtctatcatggtactgtcaaagtcctcaaaacgacctaaacactaataatgcttctttgtggtttctatggcttgtgttggagtgaagtggtctattttttcttatatgtaagactggcaaattctagttgtgctttcataagtattaggacagtgcttgctattttttgttygttaaagttatttttgggtttctggaagtgtataagggaaaatatgggaagctagtattgaatgattaactgcctactaaatgcctggttctattctagcaacatatattatttaatcatcacaaaaatatgtgagcaaactgagcctccctaagtaattaggcttagagaaatcgaataattcctaaatgtttacacaactagcaagtagcaaaaatgtcttatctcaagagtctgtgctattcaaagtagcatgggttcttagcttaaaaacaaacttgtttgtgatatatagtaagccgtttcccccagactgtttttttaggggcccaaagaggttttattttatgttcttcaaggaacatagatcatggtgtcctctgcttttgtaagtccctctgtaatctgagcctgataagcactgaataataacaggaacaccatcactgctgcyaccaacaactttgaaaacaggaactgacattccttgagcatgaacaatgtgctggatattgtccttatctattcgtgtgtgttaacctgtttgaaaataactccgtgaggtgtgcatacttctatcattcccattttgtaaatgaggaacatgggacaggtttagagttaagtaacttacccaaatcaaacaataaactagtagtaaagttggggtgtgaatccatatactcaggagaatccacatttttgtytacaatactatacttcttcagtaaatattcatgagttgaagaaaaccaattctgattaagtgaagctgaaagggaatttattatattaggaagacataaagaagctcactgaataagtaggaagccttgcttggaaaaaaagcaggaccatgagrgaataaggagcagagaacayagtcagattgtgccacaggaagagcttgggcccagggccactgctggtgctgctcctactggccagcacaggtaccacactgttggctggtggctggcccctgggacactggacttttggatctcctgctattgctgatgccacaataataaagaaaatatctaactattcwttcatctttgcctcactctttaagattcaaaggcctgagtagaagcaatcacttgatagagcccaggtcacattttaaaaagaccagatttggtataacttttgatttaattgttctgatatattttgggcagaatggtaacagaaagaaatgacaactttccacctgttgaaccttaaagattaagatattttctcagaaaaacttgatcctgttatgtggtaaaataggccagtaaaatgattttagaaattggcagttaaagaatgagaagacattggttgcatatttgtaaatccagttatgctctaagtgaccacttgcagttcattctgtttggatcatggattaaagagtataacttccaaatgactgaatcataaaatacctctggttttcgtggttaattttaactatacttcaagaaattcacttggcatcagaaggtagtactctagaaaaaggatggtgtttttttgttcacaaatatggtcgtgatcagtgttttaagaatttgttttacaggccaaagttcactttaacaactgctgtaataaaatactttccagccttgtctgatggctcactgattgtaagcagtaatccaacagaactttggttactggaactgggtcaggccatgaaataagatttgacttttataacacaacacttagtggaaattcattttactagaattctgaacttaataattaaactttttgagtgcttataacatgtcaggcagtatgcaaagtactttgtatatctctctctcattcctggtaaccctgtaaagtaaatattattgacactttaaggatggagctgatgctgacagaaataacttgcctaaggtcccacaggaaatgatggagttgggttttaaatctgcatttgtcctactctaaagcctgcttttaatgacaacactattttgtggaagaaaatcattaattaaatcacaagttaacttggattagcrttcttggatttttagatcagaagattttccttgtcacttgttcttagaaaacaagtttctttttttagattcaataacttaagaaatgtcattccatccaattcattctctgaattaaaagaatataattttttttttcgctccatagtctattactatttttaacattcttacacaggttgtcatattggaggcataagtaggatgattttctcccaggttaggtagatgggcagggtaaggtaggtggtgtggcatctcagatcatccctagtactcagaactgcacgttattaaggatctgtgaaaatagtctgttctttattgaaccttctgtgggtaccatctctcagtggtaacaaactttctaaacttactgagcatcttggaatagaatatttgctttcatttctcttcatttttcacttctgagcttcaagttcatgttttctgtgattgagaaggcaagctttatttggctgttataacttgtggttttaactgagactaatttttcatttttctaaatgtactttactaagcctgtgaattatagaactctcattttagctttaagaaatgcttaccccaacccttattatgaatgtttccctcctgcttggtttactctgtatgtttataaaactacttcctatgggccgggcaccgtggctcacacctgtaatcccagcactttgggacgctgaggcaggcggattaccagatcaggagatcgagaccatcctggttaacacggtgaaaccccgtctctactaaaactacaaaaagttacccaggcgtggtggcaggcgcctgtagtcccagctactcgggaggctgaggcaggagaatggcgtgaaccccagaggcggaggttgcagtgagctgagatcacgccactgcactccagcctgggtgacagagcaagactccatctcaaaaaccaaaaaacaaaaaacaaaaaaacctacttcctatgaaagatactcaaatacaaaggaaagaaaaagccttggtcttgttaccatggcagtagcctgagttcaagaaatgatagtggccggcctgaaaaagccaaaattcactagtatcattgacaaaagacttaaataattttttaaagatttaatacacatgattttggtctaatttgcttactaaaatcctgctacctttcatgtaaaatgttaccttgaatatgaaatatgaaataaatctgggcccaatgtggaaccctccaaagccagatgtggtactggggtcatgggctcaggggttaacagatttaaggcagcatctctgagcctccctgcagagatggctttgtacacatgcgtccagcactacctggccaggcctaacactttttagtcagatatataaacatactctggcaggcagtggggcaagctgctgtgtctttattgtcatgaacataactctcaagaaaggtgtgytttatattccaaccaaagaacctattacttgtgaatggaagaattaataagaacctaagatttttttttattactttgcaaaggggtacaccactgtatgtatggtagctacatttgttttttgttggaagcaaccatcatatggacaagacagaaattatttataatttgcatgtcattatgatatttaaaaagctctatgtctctggacctcaggccagggcttagaaacggtttcatggtagcaaactaagcattccttgtaacaggatgtgaactgcaacagaatgctccaggcaatgttaaattggggtgatttttagaaagtgacaaatgttttatgtttcctaaatgtgaaatgggttccaccagctctaaacggctgccaagttatgttatcacttgcctgctttgtaactgcctcaattattttcttccccagccctgtatgatgagattcgtcagtttcgcaaggcctgtggggaggctcatcttaaaactatattagcgacaggagaacttggaactcttactaatgtctataaagccagtatgatagcaatgatggcaggtaagtgttttatgttcaaataatgttttctattgaattgatgtttttaggagaarttaagtaagtgaaagcatttagctattaytaaacgtgctaaccacttggaatttttttgcgggaggaatcggatattttgtaaaaacatgttcaatgtgaagtggtcaaaaactcctggctttcttccacatttttttttgtgtgtgtgtggcatttcattgctgcactatgcttataaggcagtagatggctctcttgttagtgaattgccttctgttttattctttgattattcactcatcaacatatgttagacaggaatttctttgacttactcctctctgaatttaagcttttcatttatctcagagatatatatccatactatctgagacagcctctgcttttgtttgtgttaatgttttaaaatttagtgcagtatcattgatttttatactttcaaatataagttgacttattctttatctctgtgaacagcaggtctatccatttagacatccaagcttgcagcctaggagtcatgcttggttctttctttttctcacctcacataaatcagtgaasaagccttgagagttctctctagacctctttgctgtgtctgacacatcttccctccattctaagtgctgctgtcttaggccaccatcctcctccacagggattacttcagctgttcccctgtcttcctgacttttgttcccctccaatctgttctccacactgtcaccacaatttttttttaatgctaattttattatggtactgcttgcttaaaattccttcagtggtttcccttcatctttatggtaaagtgtacattccttgattcttattttaaaaaggtccttcctaagaccctggctgtgcctctgctgtgtcattttcccttcacaccatgttctccagccaggtagagttacttgcacttctctgcagatggtgccatccaaccttttgagtctttgtacgttctgtgcctcctgcccggaatgccttttgcccaaataactccacatcttggggttcagcacaggtaccacctttttcaggaattatttcccctgacactgcttctccccctrctgtttggcccattatctcctctgtgtgtccccacggcattcaagtaaaagccctatcatataacttatcacatgacattgtgattgagtgttgaatttctaggtgtccttctaggggccctatatttggatgaagatacctggtttctctggtcttgaatctgggccagccatattcttgtgtacttcttgagtgctctgtcaggcctagtagatcattccttggaactctactgaaaatcagcctactagtcagcaatggtgctgttgctctgggcacaactgctgtatctagaaaatatctgcagytgttatctgagagcaaaatctcagaaaaacctaaggatgagaagggatggaacactttgaacagttgttcatcagtgatgttggcatttcaaagattcacagtagaagactcactgtgcctcttaggaacctgggaaaagccccttggaggctacttggtgtacaggtagcccccctttatgctgcttgccagcacaagtgattgttagcccaggtaacaaagtaaaagtttggaaacgaataacagcagccacttataggacatactttgtggtagccacgctgttggttgtgcacatggagctgagatactcctcagggtcacatcggagccaatcttgtgatacctgttaccccagctgttatcctggtcacaatgaaagtgtattcattctgggaggtcagccaaccctgtcctacgcacagcacctactactcatgatacaaatgtggtattaggtcatcacgctttggaagctgtgtcccaccctccacccatcctgtccacagaaaaaaatgtgattataaacatgtccctttatttcttcctgtctgcttgtttctctgttcatgttgtttatccacttcatttcttcatttaagcagtgtttgttgagcacttagtatgagtaataaaaccgtattcatggtgtgctttaccaggtacattgaaacaatattccttcgtcctcacatcagtcctggagtggaagaaatctaggattgtgtgacttgtttaaggtcacaaagctaataaataacctgtatcactatttgaacactctggtcttctggctccagatttattgctttttcacttgtaacatggctatttcccaaggcacacactagattttatcatgaatgaaagacacaatctttgtgaggcataatatatgaaagcatgtagcatacttcctggcctatagtttatacttcctactctgttaagaaggtatataatagaattgaagtattctttgatgaacttgaaatattttgaaatattttttatattcttgtcccaattttatatgtaacttgcacaaactaatctccccaaaagtaatttacaaatttctgactaaattctgtattctacttctgtggtggyataaaaaattttttcttaaatcaatttcattgaggcagatttgcattcagtaaaattcaggtgttagatagacagtgtgatgagtttggcagtttgcaaacacctgtaaccactactcccttcaagacacagatcatttccatcctcctagaaatatctttgtgtccctttatagtcgcctccactcagctcacctgctgtccccgctgcaaccacttttctacttttatcaccatgcttagctttgccagtattagaacattatctaatcacatagtgtgaactcttgggtgctttgtttttggtttgttttgccctcactaaaaataagagataagagatcttaaggagtttgcctagaagtatttcactgtgtaagtatactgagttgctaaaattgttggcataatgttgtttataatatgttcttccattctgatatctgtgggatctgtagttatatctctttctttattcttgatattggtcatttttgtttcctttcctgttgttgtttttgcttttctttcctcctctgcttgttcatgctagggctttgccaattttattaatcttttcagagagccaagtttttattttgttgtttttttttcattacttttcagtgaaagttattttctaatttcccttgtgatctcttttgttatttagagtgctatttacaatgagatatttactttccaaatattttgtgcttttatggatatcctattgttgctttataatttaagattttgttatcctcagagagtatccattgtaagaatcttttgtcttttggaattaacagttattttgtagctcattttatggttgtatttagttatatgcttcaagtgcacttaaaagaatgtgtatttcagatgttasagcaaatgtcagatcgaaytggttgataatgtttttcagatctagttttgttttctttttggtctactggttctgtttattactaagagagtgttaaagtctccaaacatgattgtggatttgtctggttatccctttcgtctgtcagttttttcatcatgtattttggagctctcttatgtatatatacctttaggattgttatgtttacctgttgaagtagcacatttgtcattatgaaacgtccctttttatctctgatactagtccttgtctgaatgtctactaatgatgttcatctggccacaccagctttcttgtgtttaatacttgcatggtatatatttttttccatctttttattttcaacccatctgtggctatatatttaaaatgtatctcttgtaggcatttcttttctaatctattatgacagtttctactttttagagtgttttattcatttacatttcatgtaattgatatagtaggagttaagtctgtcatcttgcaaactttttcctgtttgtttgaatctatttttggttcctcttttcttgcaaccttttgggttcattagctatcttgtaacattttgtatcttctgttggctttttatctacagactctttgcacaaaatttttaagtggttgctctaacaatgtgcatccttaatttttcacagtctacttggaattaatgttgtttcactatacatgtcacaaatggaagaaccttacaacagtttaatttacatcctcattggttctttgagttattttaatgttcttttctatatatattacaaacctcttactacaatgatacgaatttttaacagtcacttgtcttttgaggacattaacaaagaaaaaactaagataagctagtattttatgttttccctaaatgtatcactttagtctttatttcttcctataaatatgagtttccatcttgtataattcagtctgggaaacttccctgggtattttttgcagtacaggtctgctgatgatgagttctttctggttttattcgtctgaaaatgtctttatttcacccccatgttctaaggatagtttgctgaatatagagttctgggttgagcattttcttgtttcagcctttaaataagtcattccatttcttggaatcccatttcttcttgtttccttgtatgtaatatcttatcttactctagctatggtcaatcaatattttccttttgtcttttttgttttcccagtaatttgaccacaaccgacctaagtatggttttctttgtatttatcctgaacttttctgagctgcttggatttggaggttgatgttttctaacagtttaggacgttttcaaaaccatatatatgtacttttttttttttttttttttttttgagacatagtctggctctgtcacccaggctggagtgcaatggcgtgatctcagctcactgcaacctccacctcccaggttcaagtgattctcctgcctcagcctcctgagtagctggggttacaggtgtacactaccacgcctggctaatttttgtatttttagtagagacagggtttcaccatattggccgggttggtctgaaactcctgacctcaggtgatccgcctaccttgacctcccaaagtgctgggattacagatgtaacccactgtgcccagcctaaaaccatatttttaaatgcatcttctaccccattctattggtctttccttctcggaccccaagtacatgagtgttagactatttgatattatcctataggttactgaggtcctgtttgttttatttttaatcttcttttctcctctgttctcctgattggttacatggatctttattcaagttcttttgtcacaggatctttagggtgtcgctttgccagtcagaaacctccgtgcacttctgcttgagttttgctcctggttgctggacttgttccacccacttggcccggcaggctgcacttggctcacactgctggcctgggtcgcacagctgccaagggcaagccaggcgcggagtggcaagggatgtgtgagtgagtgcacgcggggtccagccactgtgcacagccaggcacatcagctgcggcagggtgggcagctccaggtgcagactccatgcgaggctgtggctggaccagacgtaccacaagcagcttctgctgtgggcaccagcatctggacaaggggaacacatggtgcccaaaaacttggagacaccaggaaccacagagccccaaagagggtgttacagcatgtcacaggcctagctgggggagccctgagttctgggctcccagaagggccgcagctccttcttccttctcgttacctgcaatgtggtgagtcgggggcatgttttagccctgtttgtgttacagctctttcagtcccgccatttggtgggtcctgagttcttgtcctgtgtccaggaagaaagaagtacttggacaactggagggtgagcaaggcacagaggagcttcattaagcaacagaacagctgtcaggagacccaaagcaagtagctcctttctgcaggcaggtcatcccaacaagtgtccagctctcagtagagaggagacctgtagtgggtagctcctttttgcaggcaggtcgtccctgtgagtgtgtgagtctgactgagtctgaggtttttatatgctcagaatgaaggaagtgcatgctgattggtccatgggcggccatggatgggcctggaaaaagcaccatcggactgcctgaatggtcatcaatgaagttctcactccaggctgyggccttcactcagacctggcagcctggttcccaggcttcaggccatccctggcatgaaggtggggcttcaccagggacccatcccttcctgcctaggaacctgtctgcctcccaccaccatcatcatgttgtccacggcacccaggctattcacactgaggggcgcctgcagacccacaccaagctgccctcagccccttggcctttctcctatgcttgttgtcgcccaaagtccagagggggccaaggcggtgggaggctggcgtgtcagcgctgccctgaatgtgtgcacactcagccagattgcggcagcatccaggctcagccacagctttgctccgcagtggagaaggctccaggagtagggagaggccagggagtgggaccaggtacttctgagcctgcaggggtagagggcttcccaggcttctaagagcacaggaatgcctgggtctggagatgtggcttgttggatgcagctgcccctgggagcacagggctcctgccctaccaacatggtagagggtggagctcccacctgttcccagacctcaccagctccacggagtgtgcagccctagccacgcctcccccgctgcaactggcatccccacggtggctgctccagacaggccactgctgccatcactttgatccttattttctatttcaaattggcttttaagcctatccagtgaaatgtatgctgctgtacatttttagtttagaatttccatttgattcttttttataatttttatttctctactgacatgtccccactttttcactggttgagatcatattttcctttaagtacttgagtatatttgtaatagctgatttaaagccttatgtgctaatttgtacagctgggttatttcaagggtctgtattttgagcttttaattttttagtgcctgagttttattgttatttatagcaggagggcgagtctggtgacattctgttatgtctgttattcttctctgtttttgttttcccattaatttagaatcagaatctcaaagggaaaccatttgtcattacattcataacaatttattttataatttttgtagccatttagattatggtcaaaaagaaattctttggagaccaggtagagatatctaactatgttagtctggtcttacacatcattgtaagtaaaattgtgttaaacaactttggtcaactaaatgttagtagtctaaactgtaaggattattggtttaatcttgtttagaaatctttcaaaatgttttagagcaaggaacacagtcagaagaccagaactcttgttctgtcttgcatattttgtgaccttgaacaaataaattaatctggttatcaattcaaatgcagcaaggtatgtgagtgcatcataaactgtaaataaagtactttgcaagttattgaaaaatattagtataccttccttctccatcctacgtcaataagaaaggaaacataatgaaatctttttttttctatactctttcaaggcattatttagagcataacccttcaaaaccatttggtgtagctgtaggggagacaaatgacattgagctggatttctttctgtactgattccaaagcttactatattagcagaattgttcaatgaatcttatatttgaacttactttgctaacacttgcctctgtattcaaaaagaaaggtacaaaagaatgattaattgagaatcacaattagatgtggtctagttaatgatatgtttgtggtacgctactttccatgttcttttttgttttgttttgtttttagttttatttttaacttttaagttcaggggtacaagtacaggtttgttacataggtgaacttgtgtcatggggttttgttgtacagattatttccttacccagatgttaatctgagtatccatttgtcgttttttctgatcctcttcctccttccaccctccaaactccaaaagaccccagtgtctgttattctccttgatgtgtctatgtgttgtcatcatttagctcccacttataagtgagagcatttggtatttggttttctgttcccgtgttagtttgctaaggataatggcctccagctccatccatgtccctgcaaaggatatgatctcattctttttttatggctggatagtagtccatggtgcatatatatacaccacattttatttatccagtctatcattgatggacatttacattgattccatgtctttgctgttgtgagtattgctgcgatgaacatatgcatacatgtgtctttacaatagaatgatttatatccctttgggtgtatacacagtaatgggattcctgggtcgaaaggtatttctgtctttagatctttgaggaatcgccatattgttttccatgatggctgaactaatttacactcccaccaacagtgtaaaataggtcctttttctccacaacctcgccagcatttgttattttttgacttcttaattttatccattctgattggtgtgagatggtatctcattgtggttttgatttgcgtttctctaataatcagtgatgttgaactttttctcatgattgttggccacatgtatgtcttcttttgaaaagtgcctgttcatatcctttgcccactttttaatggggttgtttgctttttcttgtaaatttgtttaagttccttagagatgctggaagttagaccttttttggatgcatagtttgcaaaaatgttctcccattctgtargttgtctgtttattctgttgatagtttcttttttagccatgtttatgtaacagttcttttaaattttttattttggatgccatagcagcaacatcagctcttcagacatgtatccaaataaaaatcttttaactgacagtcacttaatcagcagctgtaattatccagaaccaaggcaggaaccagaaacaaataaaagcattttaaatagatgaaaaatatataatcgaatctatcatacaacaacaatgtcataatagctcaagttttttgagcatttactatgagttggacagtgtttcgatgatctatgcacatttacatttaatcttcacagcaaccctatgaagtaggtactcttacatgatacaattagaatattagtcagaaagatctttttgcttttgttctatatggtcattattgatgtttggaaacattccaggtacttctgtctttgttttaccagttcctctctctgttatagctttgtccccactccttggccattttaaaagatttaaataaaatttctgtactctgtcaaacctcctattgattatgcaaaggcagaattaattgatcatgctgttatactcttaggacagttgcaaataccagtagcatttgtaacatagtatcagcatcaactgttttayctgttagattttttttttttttcaaaactgtgctcttccctgggctaaggaccacaccttccttaactttattcctctgcgattactatcaaacctggcatatagtagagcctaagaatatatttccatatacaccaatgaatgagtgaaagagagaaaaaagatagagataaggaaaagtgaaaagaagcaaaaagaaatttgaaaatttagatgcctctttccagatgtgccaaaatcttgtagaatttgaacatgttattttagagggcaactcttattttagttgaacaaaaagagagacaatttatattttaacaaggatattgtatttctaaagcaatgtaaggtatgacaaggatattaatgatctgtaagaatgtggagatggatctggaggcaaggaagaaccagggagaactttttgctttggttttggggttgaagaaaaattgatcttcccatgtacattagtggaaatgtggtaagggaagtacaaatacaggaggaactaaagtaggagcaaacaatttgaagggagtataatcagagaagaaaaaagagagctatacttttttccttgaacaatccaagaacaagatgataggacataagatagggaaacatacttacagaaaagagaagtgtaargcaggtcaatctactgctaagggatttcagcccagcaaatgcacacattaagaataatgccagaatgtagaaaagtggctttatctttcagtagcggtggactgttcgcacacactcaacagttaacaagctccgctctgaagttattctagaccttatctttggaaataatgcaggcatgataaataaggttggagtagaaaagcactaaagatgcaatcataatgtcatcaggtttgaattgccgatgaagatctgtgggaagagtactaacacaaaaatatggggcttgagaaaagcagaccttgaaggaatacaaaatgagttttgaacttggctggaattttgcaacgtgtagaaaatgaaacatgaaaaaggtagaatccaggggagggaacattcaaaattcaacccaataagatcaaagtaatacagaaacaatgagaggaagcggagaaataagagaatataggggaagccatcaaaaaataaaataaaggggaaaagtagtgggaaacgctatgactgaatgaaaccaaaacactaaaaaaatgtggtgattaataggaaattagtatctaagattttaaaaaatatatttttgaaaatttaaatatgcatcaaatagtaaagtaaatgacaatgtcgatttatttttctaaagattgtcacaagttacatggaatccctcctcttaggctgcaagtctttgtatactcaaggagtattgatccagatggcacatctagactcctgtggtgttgtggcctttttttttttttttaaaaaaaataagatcttgcctttcataggaaaaagcatttaatttatgaaaaggtatgctacaactgaaacttcatcactggggaaagcataagaccatagtttgtattgggttaagagataaaagatttaaagtgtacatttatttacagttccttaaactagccctggaaattagactacttatagggtgaaaactaattaacttgctgtctcatccatggaatagatttaaattcaggtccccaagcaaaaattttataaagtttacccccacctggcccctcgctatcctttgttgagtggaaaacacagagctctgtagaggaaagaagttatcgtattttctggcttcccagcaatgcaggaactactgatggtgtattttggtacatgcatatccttttaaagaaaaggttgagtatatgacagacatttaaacataaaatgttttctttgtttcttcatggttgggcttctgtgaagaaagaaaaagagagaaaagaaaaagcttagttttttatgtggcatattttctggtctgtgtaaaattttattgtctgaaattgtgaaaaatgtagcccaacatattccaaaatcacagaactgcttcttgcagacctaacttgcctagaaaaattcacaggtgcaaagactggtacatagtaaatgcctagtacatgcttgctgatagattcaggtatcacacatatgagtacagtggcatcaatgatatatctgtaatcaacttgtatagaaaccaatttttaaataaagctgtatttcccctttaaacattaagggattttattttctaagtgaaattctggcacatgacatagaggctagacctgtgttcatgtgtctgagattctgttattcctttatctgtaattcctagcatattaactcttggttatttattccttaatatctgtgccacgtggttactgatctattagaaaattcttttttttgagacggagtctcgttctgtcgcccaggctggagtgcagtggcgcgatctctgctcactgcaagctctgcctcccgggttcacgccattctcctgcctcagcctcctgaatagctgggactacaggcgcctgcaaccacgcctggctaattttttgtatttttagtagagacggggtttcaccatgttagccagcatggtctcgatctcctgacctcgcgatccacccacctcggcctcccaaagtgctgggattacaggcgtgagccaccgcgcctggccagaaaattcttaaaatggtgggaaattggaatccttgaatggatccctcagtatattgtaccaggtagatgcttgattatgcatatttattgaatgaataaatgaaaaaagagtaataaatcatgtgaagttggtagtttataaattctttctgcagtaatcccaagagggagggagggaggagaggtatcttattatcatcttttagtagatgaaaacytgaagctcagaagttaagtgaatagaccaaggccacacactgagtaagtggcagaattttctgaaggacttttgactctaaactccatgcttttattaatgcacaaccctgctctctatcctgcaattgatctgtatatcagataatatttataagctgtgtttaacttttggaggcacagatgtttctagaggccctgaatgagattgtatgttgcactttacttttctgttgagggcaagaaaaggaagacataatggcaaggtgtttctatagagaggcaaggtgtttgcagaaatttataggagttggtgaacatgaaatcaatataaaagagaaaaatgacagcaagcccggggccacctgcytatgattggcccacagtaactccttgttgaaaagaaaaggtagggtgcccagagctaaaagatctcttctcaggctgcttccactgttatttgtgtttagctactctgttgatgtccctgtagtgatgcacttagaaaattaaccagggttgtgatacaactgccacttgagttctgtacttttcttccagactctcttacctagggtgcccagagaacagctagggagtgacaagaaaagcagatctttctgttttccacctgatggaggagtaggagagatgttaaagctgaaggcagtctgaaaatgaaggaatagagtagggaggatggaggggtatgggagaatggaagtggtatcagaatatttagagggaagtcacagcacaggatgagataaattgaacccttctcatgaagagtggttggaaagaaagtggacatctaattaggaggaggaaaatccttggggttgtaatattatgttcaaatacttggaagattttcctgataaaggaagatttttctctgttaactcaaagtagtaggactaggaccaacttttagacattgtgggaagatggcttttgagctagttattataggaagaatttcgtcagtgtctgaatcacctggaaattgggtgcgccacatcaggaggtaggagacgttcgaggcacaggctgagtgagcctgatggagctacactaagacagactcagcaaacattagagatgccttctctttcagagttaatgtgattctatgcagaagagaaaattatttcatatgcagacacagacacacacacagagcatgtgtgtgtgtgtgtgtgtgtgtgtgtgtgtgtaatttaagagtagattacaatccagtatacacagggccccaaaatatagaaaacatgggaaaagaggagtgtattagtttcttgggctcgctgtaacagagtaccgcaaattagatggccttaagcaacagaaatgtgttcttaaggttctggaggccagaagcccgcagtcagggtgtcagcaggcttatgctccctctgaaacctgyaggcaagcccttcttgcttattctggcttctggtgtttgccagcaatgcttgacataccttggcttcactccagtctctgcctctgtcactagatggctgtcttccctctgtgtgtctctgtctgtgtctcttctcctcttcttataaggaaaccagtaatgtaatggcccaccttactcagtatgaccttatcttaactaatgacatcttcagtggccctctttccaaataaggtctcttcctgaggtattgaggggtgagattttgacatctcttttttgggggaaacaattcaaagcaaagagaaataggattcttgctttatggtcttattattttctgtcaagaagacctgaagaagttagagaaaaatattttgactcaaacccagcaaacttgaattcaggtacaaaagattgatttttccctctcagcaatgttgaatggttttgtggataggggaaatctagtagatattaaatatttttatctgcaaaaagcatttggtaaggttctcaatgggagattaatgactaaaataaagaatgaggcattaggagataaatttgcttatgagcaagagacagatactaacagtagaaggaaatactttttagattggaaaggagtgacatatagcacaagccaggaatcagttttgggacctatgggtttttcactttatttttattggactttgtaataaaaatacagatcttcaaacagtccaagacagagtgagtaatactacaagcatcagtaatcaaaagttattctctatcataaactaaatgactgataataaatactgacacaagactacacaatgtaccataatattataaaatggagcaggcaattctcttgtgttctcttttcctccgcatgggtgaatatttctttatttgctgtttaaaaaaaatatttgcaggcttctaggattactttataagccaaatgaatgaaaaaaatgatttttttttwaatttggaaagatatgttaacagggaaaaattggttgaagcaagacaaaggttacattgccatcactagaataaagaaatgaagggccctgcgtgttacattgctcagcaaggtgttcggtaaaaatacttgagttagggggcgttcttgaaatcatcagcttattctgcagtcatgactttaacggaatcgtatgcaaaaragtcattgttagaatgaggaaactacatatctaaagacagggaaatatagcatggaacttttttctctttttwwattttaacgtggctctaaaaaaatccataaaatccattgattgtatatgtaacgtttagtctgcccagcagctagtaaattatgtagagaacatacttttcaaattgaacttttgcctgtcaccccttttgtcaaaaatcactaaaaggtgtttacaaattcattgccttttccccattatttgtacattgtcagatataagccaagagaaacagagcaaataaacattcgaaagtgaactcagagaaattgtaaatgcttagaaaactataaagattataaagtgtaaagaagctccattaacctcaaacctctcattttaaaggtgagaaaaccaagatccagaaaggtcaaattcataagaaatttgcccgaggacaaataactaaagtcaaaacacagagtctagaacaaggttctcaacctgggctgcacattagagtttcctgrcaagcttctttaatgaactgttgcaatgatcttcctaccagagattgtgatttcaggggtcatgaacggagccaaggaaattcatactttgagaaacatgcattttaaaacttctccagttgcttctgctgtgtgggcaggaatgagaacctctgatctaggatctagctttcctaatgttaacacaggaagtctttcctttatttatttatttatttatttagagacggagtctagctgtgtcgcccaggctagagtgcaatggccggatcttggctcacrgcaacctccgccttccgggttcaagcarttctccygcctcagcctcccgagtagctgagattacaggcatccaccaccaygcccggctaattttctatttttagtagagatggggtttcttcatattggccaggctggtctcgaactcctgacctcaggtgatccgcctgcctcagcctcccaatgtgctggaattacaggtgtgagccaccacgcctggcctaacacaggaagtctttcaactcacatttgtagttcagagatggcttaaagagcttcagattctgaggtaggaagcacctttagcataggcagtccacagttaacaaaccaattgttctagtagttattttcattgcaatgtgcttatttggaccgctgaacttacatccccaaagaaacaagattgtacattgttgtttggtgtctaggccagccccgagattagcttacagaataactgaaatgtagcctgtgtcagttgcactataggtcctaaccaacgcatatacagtgtttttctaagagcaagaatttatattttaaatttaggtctctcaggacatttgtaattcttctactgttctgatagcactatcaagatttcacctcctttcatcttcaacatattagatttaggatttgaatagggagttccccaattccaaactgtgtcggggaatgggaggaaatgagggatggagggttggtgagggctggagggaagactgaggcactgtgggagcgaggaggaggccaatcaagaacagaagggccagggttctctgccatcagtacctggggatatttctttccctcgaatgggttcatccaaatatttgatgaaggcataatgtttatcagacactattctaggcattggaggaggattagaagagagaatggagagagtaaagtaagcatgacatagttcctggccttaaaaaagtgacattatctcttagtgtggtgaagaagtgaaaaatagggtttatgatttgtcattttgggaaagcaggtgatgtggggacacgttttccaagcacttcaggaacacagctgaccttctctggaggagtcatagaagaattcacaaagcaagtggcatttgtatagaagttgttaggtgcagatacagagaaaggcattttgggctgagagtcactggctctcatagagagatgtgaaagaacatgtcatggtgagaaagctggtctggttgggctggagagtaaatggaaagtggcagaagaggtggggatgaagctagtaaatagcttggagtttaaggccatgctaaggaattgaagtttcgtgtttgggggtacaggaaatttttagcctgaggaatgaatgattgactgagtaactcattcattcattcatttattcagtcgttaggatttattggaagtttgctgtatgtcagacactggatgacaaagattattatgacaccctcaatccagatgctttgtagaagcagagcagtgatcagattttcattttagggacataacctttgggcaatgtgtttaggctggagacaggaaggccattaggaagctgtgataacacttcagctgaccatcacgagctcctgaactgagatgcaatgcaggcaatgcagtgggtatggagcagagtagatgcctgtgggacatatcggggggcaaatttgattgtgcttggtgagtgattgcatgctgagcagggaagggaagggcagatccaactcctaatggtgccatttgtcaggatagggaatttaagaggaygaagtctttttcccagcccaggaaccagcgcctctgtttccatttataagacctgcacccgttcattctattattggtttattgcagaacatagcgcagtctaaccgcttttcctctacttttctgttcttgcaacaaggaaaaacatagtaacgtttttaaggaaatctgatgaaggctatgaaggtgaaagaaaggctattttttggtttagaaaacattagcaagataacacatgtaaatcaaaatgcagaactaatayatttgttttagtgattcaggaggaaaaggaaattcatgcttttacttgaattatcaggatgatgctttgctttaccagtgacccaagaatgagtgttatagtatgctttttgtaaaaaatttatcaccaactggggcattgaaagtaagtttcctatgttacgyggctgctaaattggccagggacaacrgaggaggmactgaatagtcaatgaaattggaaagaatttagatcatccatgtcacacaaagccagcaaaggctgtttgtagaaygttagctgctatcacactggcttgatattaacattctagtgaataattaaaatattcctgtttattttttaataaaaagaaaaagcatatatgttacctcagagtctgtaatgatacctatagttgcatccatcagatgttgagtttttttttactaggattgtagagtagataacttagacaattaaaaagcaggttttgttctgcctttttctgcattcttgttttacagtattcagtattacaatgccattcaaaaatataaaataaaaatccttaaaagtgctctgagacattttcattattgtcagtattttctaaattgagtggttattaaatacatttttctgctggagttatttttgaagtacatctatcattttcattttctgtccataaacgcatacccaggcagagctgatactctatttcttcctgctaaaattcgggctcccattagaggatgggtcagtaggtgcagcaaaccaccacggcacacgtacacctatgtaacaaacctgcacattctgcacatgtttatcctatttttttgtttgtttgtttgtttttagaagaaataaaaaaaaccattcaggctcccatgaggtgatcaggtacttctttataattgaatatacttttcagctaaacccacccctttccactggctgttttctttggttgttccttcagggctagagtggaaaagttcagtgttttattcgagacaattgactcagagaaaagaacaactcacacagagaccagaaagagattcgtgctcagtaacaaagagagagtaatacagacttgtggagtcatggtcttaggtctgtgtgacgtgtttgatgctctgcaaggtggtcagtttctggggtgactagacaccaccaatttctggaggatctgcctgagtttatatcctttagatagtagtaacaggcttagtagagtagttggaataaaattacaactgaggaaggacaagaataaatggtatcagaggagaaattttcccaggagggcgaggtcatgagttaggagaacactaagaccgaatgctctgtctcctgcttccctgagtcagaagtggcaggcacactagacgaagcagcattttgctggagactttgttgagaattcaggtgctttgggagcttagagaggaaacaaaccccggtatggacttttcagacaaaatactgctttctttgcctaatcaagtaaagttaggataatgattaccaggcactttgtaacagcaaggttattctttttttttattattattatgctttaagttttagggtacatgtgcacaatgtgcaggttagttacatatgtatacatgtgccacgctggtgtgctgcacccattaactcgtcatttaacattaggtatatcttctaatgctatccctcccccctcccccttccccacaacagccctggtgtgtgatgttccccttcctatgtccatgtgttctcattgttcaattcccacctatgagtgagaacatgtgaacagcaaggttattcttaacgctaaagttaaggttattctaaactctaaattgtttgctagagaaattacaaacatagaaagaaataccacataggagccaacgtatataacctttagttaaatgtggctcttatgtgtgaccaggaactagcaagaactgtggcagagaaattaagaataccctcgctcctcacagctgccctacaggatttttcctttttctctcctttctttttttaaatttaaatttttatttattaaaattgtatatatttgtaacatacaatgtgacattttgatagacattgtgaaataattttatagtcacgtactcatctcctcatgtggttaccatttttttgtgtatgtgtggtaagaaccacacaaatcctctcagcaaattctaagtgtataatacaacattactaattagagtcccatgctgtacatcctcytctcttatttccttagctagttgccacctaggactctttacctctcctgaacctccactttgtcttagacagggcagtagtgctgttctcttctcttcccctaaaaatgttgatctcttagacccagtgccagtttcttggctatgtcctccttcctcatgtcatgtcatttttaaaatctcctcccctgccccagctttgtgctgaaataccctggagagttgattttggattcattctgaaatataaatgacctaactgtagtctttgaaatatttgagacccactccttatgctcctaaccccttatcaccacaaactgggtgccttacacaacagaaatttatctgagagttctgagggttagaagtctgagataaggtgtgagcagggttagttccttctgagggctatgagaaagaatctgttttgtggctctccccttacttgcaggggattgttgcctatctttggtgtttcttggcttgtagaagcctcaccctggtctctgcctttgtgatgatatggtgttcttcatgttgtatgtctgtctcttcacctggtgttctttttataaggacactaatcatattgcagtaggagcctaccgtactccattgcgacctcatattgactaattatatctgcaagcacccaggttccaaataaggtcacattcttacatgctaggggttaggacttccacctatgaattttggggggctccagttcaatccacaacaaatgagttcaaaatgaggaaagcaaaactggagttcagagagaatctttttggctcattttgcttgtgtgcctaagggctgagtgttcgttttaggtaagagagaaactgtgaggggttagggtttgggttagagaagcctactactgtaggctagatgccaactaaaaacaactgctgggggcagtggagagggaagtagactgcagggttgatgtaagaaaaacaggtgagtttgcayttgttgggggagcgccaggaaacaagagtgtcaatttctggctcatgagtgagaagtattcctccttagttgtgcctgagaagctcccagcttccataactcctcactgccccttccccgcaaaaccctctttgtatcaccatcttgagattccttatccaaatttaaactccattagtaatttaaagctctgaggaagttcatcccaacctggaagaggagagaggtgttctgggttgtagagctagccactcagaggcatccgggccttcctctgtttcctaaaacatcattgtgcagaatgcttagaaggggttggtagggctattcattaagtgcagtaagagtaaaacatgcttttctgggctggctgggacttactaccacatgaaatctggaaaagtacattctgatttccagccggctgtgaatttacaaacttttggaatgcaatctatttctaggttggagaatggcattactaaactgctcaatttaataattagaggtagaaaatataattggtttatctttgtagtcaaatagcaatttcatatatgcagataatttgaatctgaatgtacagccaagtattcaaaatataaatagatgcagagaaaaaatcaaaagcacatataattcccccagaccctacataaagcaaaaggaaccactgcagaaaagaaaagaaaaacccaactcctccttaacaatttgttctcccaccaatctttgatttataaatctagaagcctcatgttttctggaatccttaataaaaaatgactttttaaatgtcacaattcttaatttttcttagtacattgaaaaaaattaaagctagtaaggaaaagaggcatcccagtactttctgacagaggaagaaagaaaaggactaaccacctttctaaatgtttaatagtagtcatattaacttattaaattgtatgctctcaagaaacaagtgggtgtttatgcatgtatcctttgtacgatgacaacaatgacaacaaatgacttagtggggctttggttctttgttacattcttttttcaaaaaccaaggtggattatgtttattaaatgtttttaaaaatttaaaaaaatcctactaaaaactaggagataccttgggagtttccaaaatcaaggttaggaaccattgatttataaagatcgtctgcatatgtgtgtttcctagttcaaggagttagaaaacttttgataatttaatgggatttatgaacctattttaagagttagagtctgtgaataactagataaagaagaaacagagcaactgaggatttggttttatgccctgtagagttcaaattaaattttactaaaaggcagtttaaaagtttaaaagattaacttctctttcatttcacgcagtctacttcagaactagtcaccataatgaactcaacagacgtgccctggaatgatttggaatactagaagagttaccgtcagagttgaaaaggggccaagcacagtggctcatgcctgcaatcccagtgctttggggaggctgaggtgggaggatcgcttgaggccaggagtttgagaccagcctgggcaatgtaggaagaccctgtctctacaaaaaatatttaaaaattagcagggcacggtaaggcgcacctacagtcctagctacttaggagactgagatgggaggattacttgagtccaggacaggagttcgaggctgcagtgagctatgattgcaccactggtctctagcctgggtaacagagagaaaaaaaattaaaaagcttattctgaagaccagctcgcttcaaccgagtgaatgaagaaagcttttatgtttggaactattttctgctaaaactgatttctgagttgtgttctgttagacaatatctcaatcaaaacttctttgacaaaaacatctcatggtcatgcaagtttggggaatgctgcatgaatatacccctgcaagccattcacagtgcacaggcatttagaaaagaccctgcaagtttacaaaaagaaaaaacttctatatttttggataaattcatcataccaaacttattttaagtatggctaagttcttctcgtgtatcatttttaatattgaaccaaagaatagagcaagtgaatagttattaggttaagtcctgtagacatagaagattatgctctgtgggaatataaatttttaagcagacaagattactatgaacacataactgtaagagcataagcatgcaggtataagtggtcaattttagaaaaccttccttacaatctctttaaacatcaccccctccccattcctgtggccattgtctgaaattctgctgttcggtccttacactttcatttaagcctattaaaagttaagtctatttaaaggatgtaacacgttcagcaaatgtgtggccttacttgtggaaaaccagctaatagatgatgagaactagatgtggactttgtgaaaatattcaataaaaacaaaatccattgagctgagactgtaggtgacaatcccttccttaccctctcccctcttgctcccaatgaaaagaagtcaggacatttgtccaacccaaatcagaaacccaaaaccagaaaccaagaaaagaggaagtttttctttaggctgaaaattgcgttgccagtgagatttttttgtattaatgctctgactaaagaaatagctggaaaaaaatagcagaaaaatgtaatacaaatttatgcagttaaatgactgtctgggacgaaaatcaagaaaacaaagcccaaacgttacctattagttagtgagcggccctcatttatagtgtgctgaaactcaactaccctctctccacacttggcccctccagccctgccatctggagacagaaacctcattcatttccacacgtcgtacccgacatgaattcctaacctgtcaccgctcctgatcccacctcctagctatmcctctcttctccagcattttggacatgtctstcagcatatgtgtctgcctatctctcagaatggagtatgagtgtccactcagagacagagacttatttatcagtgctgagcacatagcctagaacatggtagtcattcacagatatttctgatgggacacaatagttaaggaaagttcctaagagctaggaaatgtaagcctgtattgctatcaagaaattctggaaattccttctttggttactttaggcttgaaaatatgtcttctccgtgtgtacttccacagccttctcagccagatggcctcagtgggagcctgaagtgtcatktaactgctttagtttttaaatatttgtcacgttatgtatcaagctcttagaacagtacctcgccgatagtaagtgctagataagtgtattagagaaaatctttaaataaaaacccatttgtttatacaaataggcaattgcagccatagagtcattgtaaaacttagttatgttcattatagacattttttactctttttggggtttttttgtttttttttttttgttttttttttttgagacaaggtctcaccctgttgcgcaggctgaagcgcagtggcgcgatcttggctcackgcaacctccgcctccggggttcaagtgattcttgtgcctcagcctcctgagtagctgggattaaaagcatgcatcaccatgcccggctagcttttgtatttttagttgaaatggtgtttcaccatgttggccaggctggtcttgaactcctggctcctagcagtccacctgcctcagcctcccaaagtgttgggattgcaggcgtgagccactgtgccccgccaatagacattattcttcattaaagctggtctaatacagaattcatttagattttgtaagtatttattaagtttctagtatccacttagtagaaagtggatagtagattgtgctagctgtatggtcaatataatgatggttagtgaggcaggcatggctctcaaagagtatgtagttcattaggatgggggttgtctccccatgaagggcaggcacatagaaaaatttctcgttgattcaggcccagtgtcttcttcagttagctttttaagacttgtaccttagtctcttccttcattttctactattgctgaagctccttatattttctgtatattgataatgcagttttttgttttgtgttttgttttgttttgttttgttttgtgacagagtctcattctgtcacccaggctggagtgcagtggcatagtcttggctcactgcaacctcagcctgctgtgttcaagcgattctcatgcctcagcctccctagtagctgagattacaggtgtgtgccactgtgtgcccggctaatttttgtatttttagtagagacagagttttgccctgttggcctggctggtcttgaactcgtggcctcaggtgatctgcctgccttggcctcccaaagtgctgggattacaggagtgagccactgcaacaggccagataacacagtttctttttctctgtttcttcagcaacgtgcagacacattggtgtacagatgcttcattcgctaatgcctcagatggttgtttctcaaacaggaatcctactactccgtggcttctcacttttagcttttcctaatatttcctaatagctttctcaaatctctcctgccttggtcctttccttccacattttattcagttggactctgactcctgtctgatttgccagtgtagatggggtggggaattacctgcataggcatagctggtggtgtcttaggggtgtcagctgcacagagcagagtgtgtgagggaaggataactcgtgtccctggttgcagagtctgagtgatccccscagtaaactaatgtaggatatatttggatgtccaggtcagcagagtgaaagtaaacagtccagggtctgtgctaggattgagtgtggccacagatagcacggaacatgataacggtggcttaaattgttttttcttgtgtaagaaggaactctgaggtgtagccagtcaccgctgttggctcatcattagtgtcaggattggggccgctcttggcatttctctcgtggttacaagatggctgccacagctccagtcatgtttatattcagaataggaagaaaagcaatgaaggtgccatttcgtattgaaggaaatagtttaacagggctaggtaggattttgactgggaaagaaaggacgtagagaactacaaacttgataaggtagaaactgcaaaacaatagctggtctgatgtagaggcagaagtgcatagcagttaaaagcctggactttgagttagaaaaacatggattcatgacacttacaagctgttgtcttaatgtgttccttagtctctataaagtcttcttttcttaattggtaacaggagtatctgctttttaaggtattgtgaagatcaaattagggaagttttaaggtgaagccaagcacttagtaattttcagaaagggagacttattctgttcctcctccttctcttactgttgtatggttgtcaatcagaatgaactagaatctaagatgcttttgggtgagtagcagaagagaacaatggaatattggattaaattcagcccctggagagtggaaatcctagggttttattcttttagcaggttttgtgatgaaaatgtcaccatcaaaccagtcttaactgttcatcctatatacaatactttttagatctttatactttaaatttttcatcatctttagtttccatgtattaaatacaaaaaattgggccaagtcaacccagaaaacctcttctcaagagtaaatttatgatatttgtgacaaacaaccaaataaacagatctccagcatatgttgacactgttcactgtctctaacccagtttcccaaatgcctttttactttgtaggttatcattgtgaatctcattttccattttggtaataaatttaacagctgaatttttttctcactaaggttttatatttttaagttatccatgtattcattttggattttgacatttaataaccttcctgaaatacatgggagaaattatatctacaatgtagaagactctaacatgtactctaaggggaggaaataaatgccacactcaaagcaattatacaggaagtattaaagatattaaatatgtatcaaaaatttaaaatgcaggtttaaaagaaagtaggtaaaaaccctaactttggcagtatacatgttaagaaactatttatattgttttctgctgagcagaaatctaaaaacaaatggcctttaaatcagacctattagttttgtaataggaagttctgtgagagacagataaaacctctgtattaagtgtgcagtataacctattcatctgaaatatacatgattactgtatggttgtgtgttatttccatttaagagttttagtaaaggaagccaagcccttctgctgtgagggaaatatagcatgtgagcatatatattcgtgggcaaggcagtgccttgaaaacaagtgtgtggcatccagggagatcctagatgagttctagttcatatgcagagtggatccaggttgcgtgcatgcttagtattaatgcatgacttctgcagagtctaggtcaggaccattcttcctgcccccttcacaaccttctccttgctttctccttgcctcatgtgwcttcaggaatttgtgaatgattctgatatcccagtgatataaaacatgatctggcaaaatttgatggtgaccttttctgcttgtacctttacycatagatgaggttttccgagttctgctgctttcccctttgccagcatatactgcttttgttgaggaatcaaggtctcyggtggtcgccaagtgaaaaggaataaagataaaaatgaaggcgtgactagttgaaaaatagagacagaattttaatgtgaaaattgtttatgaacagaaggagagaggctgcattgtctctataagtggttagtaagtggagactgcagtcacctagatggccaaccccagggttccatatagtaaatgctttccattcagggctgtttgaaagttcacctgtctayggatctgctaatgggaagcacatacgtctccaggtacagtgaaataatcacttggagataagactccccacagaaaaattaacacaacttcttttatgaaagacaggtcactgtaaaaagaaactctacccacttatcatcaattgttgaaaaaaaagatttatgatgacattgaggtatgataatctcaaatacgttctgcattgtttttaaaagctttgtgtttaaaattcatagcactttctaatcctgataaagtagcctaattttctagcttgctttgttcagtaaaatgtatttctaaatccattttaagcagctatttcttcaatttgagtaattttctctcaagttaatagattccacacaagcatacctgacttttaatgttaatatatactatatattccaaacttgctagtgacagtagaaagcacaatcaaaaggaaattcagttgtttaaagcatatctggcttattttgttaaaatgtttcttcattttactcatctttgccaaagcatagtgataccaaatcatattttacaggttgaatatcccttatcttaaatgcttggaaccagaagtgttttggattttggattttttcagatttcggaatatttgcatatgcttaccctaacctggttgagcatcccaaatccaaaaatctgaaatgtgaaatgctccagtgatcatttcttttgagtattgtatcaacggagtttcgattttggagcatttcagacgttcagatttgggatgctctacttgtaccttgcttgtattgaggttccatttcccccttccctctcagcaaaagtaaaagaaaagagaatgtgttagatacgattttgtcattttaacatgagatgactttaaaactaatcaatgaaaggcatttgcctaacatagcaaatcccttcatcaataaggtcagctataggaactggccaagaaggaaaaatattttgattttgaggcatttggcatgggtaattgtatttacggatagatgttttcattttatactgagtctaaaataccttaatattttgttcaaactattatacctatataataataatgcctgtggatatttctggcattttcttttgtttacagggtactggcctaattgccatgagtctcattttttttcttctcagcaatgccactggctctctaaaaaacagaggataatgtgatagagacagataaagaatttttctaaattaggcaatcaaaccaagaaaaaacacataaaacatgcataactaagtcagtgtttcctcaaaaggggcagagtttggtaaagaaaagccttgtcttgtacactgctgtgtatgcactttatagaaaagtactagcatagagtgggtgctcagtaagtgttagttaaatggatgttgaagggttgggaaagagaggagttgagttgagcacagagatgtgatacaagtcctacacagtcatgagtttataagtgtagttttagagttactcctgtgtatttgaaaactgaaagcaaagccagttccagaacaggattaaggggccagccagctgggcagtttcccagtgtgctaatctctaagagacattgaaaccactgaaaatactcatgacagaggaaactgtatttcctagaatttctctactgtctgtcattgggattagacataaggcattccagggctgtgctcccctgtcccttaaagagatattctgtttttttctaaggagggcaggttgagttacttacagatcttttgcattgctgagtgaaatattcaaatttgggagcagagccgagttgtttagacaagagagaatagtcaagtgctgtcacaggggatcttcttattctattctacctctaggcagaattaagccttttttctcaataaattttaaaccaacattttaaagatattggtgtaaaatggtgtcaaattgttaacctacagagtgattacatgttttggtgtctcattgaagctctgtaaaaatgctgttgaacagatatatttaatttaaaaatttttaataaccacattaattaaatgaagagaaacaggtgaaacagtaattatattttatttaataaatctgcaatatatcattttaatgtgtagtgaatataaaaattattgagatttattacattgtatttttttgtattagttcctcaaatccccgtacttcagtttaaactagccacatttcaagtgctcagtagctacatatggtgtgtaactatcatattggactatgacgtgcagccctagacaaatcagtagagtcagtgactcccagttggcatcattgagctggtcctaaaaggtcctttaaccagaattctctctttggccagtgtgaaatttccagtgttgataccagtctttaaaaatcattttaaagaaccataattatgaatgtgttgaagtatttttcttcagtagtaatgcttagtttaatgtgtgactgcacatgctgttcatttgtgatatggttatgctttgtatccccacccaaatgtcatcttgaattgtaatccccataatccccacatgttaaaggtgagaccaggtggaggtaattgaatcatgagggcagtttcccccatgttgttcttaccataatgagtgagttcttaggagatctgatggttttataaggagttctcctacctttgctcggcacttcttgctgctgccttgtgaagaaggtgcctcactaccccttcaccttctgccatgattgtaagtttcctgaggcctccccagccatgctgaactgtgagtcagttaaacttctttcctttataaattacctagtctcaggcagttcttcatagcattatgaacatggattaatacagtaaattggtaccgaggtagtgggacactgctataaggatacccgaaaatgcggaagcaactttggaactggttaacaggaagaggttggaacagtttggagggctcagaagaagacaggaagatgtgggaaaatttggaacttcctagagacttgttgaatggttttgaccagaatgctgatagtgatttggacaatgaagtccaggctgaagtggtctcaggtggagatcaggaacttgtagaggactggagcaaaggtcactcttgctgtgctttagcaaagagactggtggcactttgcccctgccctaaagatctgcggaactttgaacttgagagaggtgatttagggtatttggcagaataaatttctaagcagaaaagtgttcaagaggtgactgggtgttcttaaaagcattcagatgtatgccttcacaaggagatcatttggaattggaacttagtttaaaagggaagcagagcataaaagtttagaaaatttgcagcctgatgatgtgatagaaaaaaacccactttctgaggagaaattcaagccagatgcagaaatttgcataagtaacgaggagccaaatgttaatcaccaagacagtgggggaaatgtctccagggcatgtcagagatcttcatggcagtctctcccatcacaggccagaggtctagaaggaaaacatggttttgtgggccaggcctagggccttgctactttgtatagtctcaggacttggtgccctgcatcccggccgtggctaaaagaagccaatgtacagctcaggccattgcttcagagagtgtaagctccaagccttggtggcttccacatggtgttggtcctgcaggtgcacagaagtcaagaattgaggtttggaaaccaccacctaggtttcagaggatgtatggaatcgcctggatgtcctggcagaagtktactgcagaggggagccctcgtggagaacctctgctagggcagtgtggaagggaaatgtggggttggagtctccacacagagtccccactggggcactgcctagtggagctgtgagaagagggcaaccgtcctccagaccccagaatggtagatccaccaacagcttgcaccgtgggcttggaaaagccacagacactcaatgctagcccgtgaaagcagccaggaggggtactgtaccctgcaaagccacaggggtggagctgcccaagaccattggaacccacctctgcatcagcgtgaccttgatatgagacatggagtcaaaggagatctttttgtagctttaagatttgactgccctcctggatttcagacttgcatggggcctgtagccacttcattttggccaatttctcccatttagaacaattgtatttacaatgcctgtaccccagttgtttctaggaagtaactaacttgcttttggttttactggcttataggtggatgggacttgccttgtctcagatgagactttggacttggacttttgggttaaaactggaatgaattaaaacttcgggggactgtcgagaaggcatgattggttttgaaatgtgagagggacatgagacttgggaagggccaggggcagaatgatagggttaggctttgtatccccacccaaatctcatcttgaattgtaatccccataattcccacatgtcaaggaagagaccaggtggaggtaattgaataatgggggtggtttcacctatgctgttcttgtgacaggaagttctcacgagatctgatggttttataagtggctcgttaccccttcacttggcacatctccttcttgtccctttgtgaagaaggtgcctagcttccttttcatcttctgtcatgattgcaagtttccagaggcctccccagccatgctgaactgtgagtcaattaacaccctttcctttataaattacccagtcttgggcagttctttatagaggtatgaaaacggactaatacaatttggtcaaccttatctatggagtgaagtatcatcaatagataactatctatttaaaccaatgacgggttacatcttgttgattagagaggaggcctggattatggatgtcatatttggcagctaatgggaaaccatgtccagagaagatgaggaacaactttaaaatataaattcagggaaaagagtaaaggtacaaattgattatatgtgtttgccatttgtcagctaatgatacttttccttgtagttacttttactaggcaattttttttcctcctttctccctcatgaactcacttgctgtgttcctttttttaaattgagatataatttatgtacaataaagtttaccctttaaactgaagttatggtgaaccctcttcaggcggttttagtattctcacaaagttgtgcagccatctctttgctccctttctcacatgggtagctaattatccttggatcatgtaagcatgwctttgtggaatcatagtctgcagatttagtattagtatcaaattgatatctctaaaggggctttctgcttccatatttactctggccagtgcttcaaccataacactggatctttattatattgctccaaatcagagcctttgttttaattacaaatcttctagggctcccttcacataactctccttccttgacagacatactcagaaaaggggaggggaaggggagaagtgcagcattattttggagaacccatatttgaattgttctctatgtagatatttaaaaacaccctcaggagaactaatacaatattaaaaattagagaagtggtcttgtaaacacttgaattaaataaccctttcttttttccaaatgcgttaaaacccaaaaccttacagttgtttgaaagattaaacaagttgggtgtggtggctcatgcctgtaattctagcactttgagaggccgaggtgggcagattacttgagctcaggagttcgagaccagcccagacaacatggtaaaaccccatctctacaaaaaaattagctggtgtggtgctgtgcacctgtactcccagctacgtggagggctgaggcaagaggatctcttgaacccaggaggtcaaggctgcagtgagccatgattgcaccactgcactccagcctgggcgacagagtgagaccctgtctcaaaaaaaaaaaaaaaaaaaaaaaaaaaagaaagaaagattaacttaaacccactctaaaaatagaagttatgtactttgattagtaacttatttctggcattactacagttcattttgaacaccttaagttttaaaaggaaagggaacatctgacttactggacatactcaaggacttttgtttcaatcaggtgcttgtttcgatcaggtgcgtctaccagtattttgaagggtttgcataattatgcagaatcttctcctagtcagtaaccaaggattatacagtcagagtccccactttgtattccacttaaatcatactgttttgcattattttaaatggttgcaactttatttttattgaggggaaggcatccggaagaaatgtggttatcataagatcatctttcctttggggcattggagatattttccaaccctaaaattgtgatttctttctgactgccattatgcttaaacaagcatcattgcttagttatcgtgttctattgcattgctaacgtgatggactggaccgacagagaattactctgtagctcactattcagattggaagaaagcactggaaagagcaggtgtttgaatttttcatttttcttcttatgcttttctttctctctttctctttaccccctttctcacatgggtagctaattatccttggatcatgtaagcatgtctttgtggaatcacagtctccagatttagtattagtatcacattgatacctccagaggggctttctgcttccatatgtactctggccagtgcttcaaccgtaacactgcatctttattatattgccctaagtgatttccaaacctatgttgaacaaaagaatacaatattgaagacttttaatttgagggcttatatctttgcataccctgcttaatttttttccaagtgtcccattgcagattgcaagtataagttagtgtcggaattaccatacgaaactctctttctaactttaatcggtaatttctcagcaatagaaaacatgatgctaatgaataatgtacccaaaagctcttattatagggttggtatgaattccacttaatgacaagctttctcaagcagcagttgatttgaaatcctacttttcattagtgaagtataaaatgttaataataccttccactgtgctgttcttttgtagcatagcagcatatatcttccctgttcaccatggactctttttaagatcttactagtaacttcctataacataaataagatttgttcaagaaataaaaatgtgtgttttcccattgttagctatatgtttttctaataatcacatccgaagcttattatacagtagtagccttaagatattatttttttaaatatactactttggtcttaatactagtttttaatctcttcttgtttctatgaagtctgaatgagattttcaaaattgaataataatttgatccgttaatcttttgaagctagtaattttattttcctctctttgcagtctctgaggttcgcaaatgaatagagcttcattattgcagtctgcatttaataacvattatccattatcttgtaattaagactccctgtaacgaatcatgaggacaatgcaaaaatacatagtacatttctttaatgaactggaaaatgttcatcttgttctatttagtaatgagttgctgaatagtcattaaatccactggagaatagagctagatggattttgaagactgtcttgagtttgtggttaatctattagaattaaaatttcatcttctatttttatcaacagctgattagaagtcattctgtttgaccaaattgattagaagaccatatacaagggcagctgttgtttaatgaaagtttttaatgaaactgtaccatggagacttgtaattatagtccttagaaaagctttgagttgccttagaccacaaaaatagtattgtgctaaagatttcaaattaggaaaataaaaaatacaatttaatataatactataaatttattattaattttaatttcaactaatcacagttgaatattagtctacttagtgtgttccttttgactttttcagccctttcatctcttagtttagtcatttagttgaaattgtgggcactgatgaaagaacatttatagggatagctattgtaatttgagatattttctcataagatttttgtccccaagctgagcagaggtaagcttggctaatgttagatttatgtgagctctgaagagagtctgtagtgctgtgtggtgttggtaattsaaaatgtagcatttatttctctaaagtaatttcgttttagcagaagggcaaaggaagcaatgttaaaatgagaagtaaaacaaaagtgtgtcctacttagtcccattggaaaatccatttttcttttgacagcagtaaagtaatgatgtactttctaaaatattttgtgtaattaaagctaggtcttattcctcacttaaaaaatagccagtgtctgcatgcctgaactatttttaatatcttgtggtctctgactctcaattgtcctttctcaacacatccaatacagacactaaatttagcatcttaaaacactgatttcatgtgatcagacctcacattacctaaagaacagagcccaatgtctgtggrttcaaagctctctataatattttcctaagggatatttacagtcacatcttctaaaacatacattcatatatctgtgtatatgtccctcctcccacctcacctccaacacagacttcttagatgtattctttcattatttggtatgccatatactttctttgcttttggtgtttctttttatggtggtgttcttccatgtgtgccctctcatctttaaattttgtctctccttgaaggtctgtaacacattccatctgttccatgaagccttcccgtattattctagctaaagttatttctctgatcctttgtaattcttattgatcataatacttactgggcatatgatatagtttggatttttgtcccttccaactcacatgttgaaatgtgattcccagtgttagagatggggcctggtgggaggggattggatcatggaggtagatccttcatgaatggctttagcaccatcccttttggtgatgagtgatttcttgctctgagctcacatgagatctggttttttaaaagagcatggcacctccccgcatctcactcccactctcgccatctgacatgcctgctctctttgctttctgctgtgattgtaagcctcccaggagcctctctaggagcagatccaagcaccacacttactgtacagtctgcagaattgtgagccaattaaacctcttttctttataaattacccaatgtattagtccacaggctgtgcaggaagcatggctggggaggccttaggaaacttttagtcatggtggaagaggaagcaggcatgtcttaaatggctggagcaggaagaagagagaggaggggaggtgctacacacttttaaaccaccagatctcatattaactcactattgcgagaacagcacgaaaggggaaatctacccccatgatccaatctcttcctaccagagacacctgaacattggggtgggggttacaatttgacatgagatttgggcagagacacagacctaaaccatatcactcagcctcagatattcctttgtagcaatgcaagaatggactaacacagaaaactgataccaggagtggtgtgttgctataaagatagctgaaaatgtgggagcagctttggaactgggtaatggagaggttggaagagtttggagggcccagaaaaagacaggaagatgagagaaagtttgaaacttatgagagactggttaaatggttgtgagaaaatgctgacagaaatatagacaatgaagtcaaggctgaggaggtctcagatggaaatgaggaagttattgagaactggagtgaaggtcacccctgttatgtcctagtaaagaacttggctgcattatgttcatgccctagggatctgaggaaatttgaatttaagggtgatgaactagggtatctggaggaagaaatttctaagcagcaaagcattcatgatgtggcccggctacttctaacagcctacagtcacatgctggagcaaaggaattacttaatgtgagaacttatatttaaatgggaagcagagtataaaagttgggaaaatttgcagcctttccctgtggtagagaaggaattcaagcaggctgtggagcaactgcttgctagagagattagcttgtctaaaagggagccaagtgctcatatataagactgtggggaaaagacttgaaggcatttcagaggtcttcgaagcagcccctgccatcaaaggcccagaggcctaggaggaaagaatggttttaggggacaggcccagagccctactgccttgcacagcctcagtatgctgccaccagaatcctagaagcctcagctgaaaggacaactgatacagctcaggctgctgctgtggagrgtacaagttgtaagccttgctggtttctatgtgatgttaagccttgaggttcatggaatgcaagagtgaagggggtctggcagcttccatgtagatttcagaggatgtgtcagaaagactgggtacccaggcagggattctctactaaggcagtgctgaagggaaatgtagggtggagcccacacagagtctccactgcagcgctgtcttagtggaattgtgggaatggggctgccactctccagaccccagaatggtagagccaccagcagtttgcaactaccacatggaaaagccacagggcagagctttccaaggacttaggagcccacctctttcaccagtgtgccctggatgcaggacatggagtcaaaggagattattttggagctttaagacttaatgactgccctgctgagtttggggcttgtatgaggcctatagygcacccctcccccttttttggctgatttctccctttgggaatggtaatgtttacccagcacctttgccacaattgtatcttggaagtataacttgtttttgatctcaggctgacaggtggaaggaactcatctccagataagactttggactttagactttggcatttttgagctaaggctggaacaagttaagactttgcagaactgttgacagggtattactgtgttttgcaatgtgaaaaggacatgagatttgagagaccagacgcagaatgatatagtttggatgtttgtcccctcccaatctcatgttaaaatgtaatccccaatgatggaggcagggcctggtggaaggtgtttggatcatggtagtagatccctcatgaatgtcttagcaccatccccttggtgatgaatgagttctcacaagatctggttgtttaaaaagaatgtggcaccttccctctctctctcttgctcctgctcttgccatgtgacatgtgtgctccctctttgccttctgccatgatcgtaggcttcccaaggcccttaccaggagccaatcctgatacaacacttcttgtacagcctgaagaactgtgagctaattaaacttcttttctttataaattacccagcctcaggtattcctttatagcaatgcaataatggactaacacagcatatgttcagaaacaccwtaactaccagatacattcttatttccccccacacctaatctctagacaataaaggcttggcttgatatttaaggacttccagtttcagctttaacatataaagagcttggaagttgtcactcctgtccttagagcaagaaaaagcagaattaactgaaaatgagtgacttttctcagacccatcaaagacctgaggtcgcaaggtaaactgtcagcttgaaatccagagagacagataaatcctgagcgtctcagctgaaatttgcttacctggagcagaagctactagaaccaaaacctagtaggaacacttaaatggtaattttgacaaattactggaggctgagtgtggcccccactcttttttgggttttacctccaagaaccccaccaggttctcacagtgaagagccaaagaaggtcccttcttggctctggcaggagaaggagaagataatcattgtgcaatatgcccagcatattccctatagtaaagcctactctaggacaaaatactaagtcttttcccgcttgagagaagggcatttcctctctagtctttctgtctcatcaaaatgggcggagaaaagctaagaaacatttgtgacagttacagcccagggacacaggaccactgaaagactgagatttaatactaaggctatagaatactcctccctcatctgttaccaccacagcaacatggtttcagtataagattacagctgacagagctaaaatacataggctctctgaagaggaattttagggaagcccagaataaagaggggagataaaaacaagaatactatagaaatttgaagactatggcagctacagcaaaccttaaacacagcccaactccttgcccgattaacataaaaccttacaccaaaggcccatttgtttttgttcatgttacccaatatatcatgcatagctttcaacaaaaaatacattggatgctagaggcaagaaaaaaaactcaaagtcttttttttttttttttttttttgagacggagtctcgctctgtcacccaggctggagtgcagtggcgsgatctcggctcactgcaagctccgcctcccgggttcacgccattctcctgcctcagcctcccaagtagctgggactacaggcgcccgccactacgcccggctaattttttgtatttttagtagagacggggtttcaccgttttagccgggatggtctcgatctcctgacctcgtgatccgcccgcctcggcctcccaaagtgctgggattacaggcgtgagccaccgcgcccggcctcaaacagtctttatagagaaaacaagtatcagaatcagattcagatatggcatagatttgggaattatctgacagagaatttaaaataactatgactagtatgttaatagctttaatgaaaaaacagacaacatgaaaaaagatgcataatagaatcagagagatggaaactaagtaagaattgaaaggaaatgctagaaatcagaaacactgggacaaaatgaagaatgcttttgatgggtacatcagtaagctggaaactgctgaggaaaaaaatcagtgaccttaaagataggtcaatagaaacttcttaaactgaaatgtgaagagaaaaaactgggaagaaaaacccccacagaacagaacatccaaaaactttgggacagtttcaaaaggcataacatatggtgtataattggaatactagaagacgaaagaaaatagagcagacaacatatttgaagtaatggccaggaactttccaaaattgatgtgagacaccaaaccacagatccaggaagctcagagaacaccaagtaggacaagtatttaaaaactgtgcacctagacatattatagtcaaattgaagaaaaccaaagacaaatagaaaatcttgcaaaaagccagagaaagaaaacacttttcattgagaagaaaaaattactacaatggacttctcattggaaaacatgtcagcgtggagtgaaatacttagaagggtttaaagaaaaaagcaaaaacaaaaacccaacaacatggaattctgtgttcaatgaagctatttttctaaattgaaggagctcagacaaacaaaaactgaagtaattaattgccagcaaagcttcccaaggcttcagagagcctgtgtattttagctctgtcagctgtaatccactcttattacgctgtaatccactcttattacactgaaatgttaaaacaagtttctcagggagaagaaaacttatatagatcagaagctttgatctgcatttaaaaaggaagcgcattagagaaggagtaaatgaaaaataaaaataaatttttaactgatttaaaagataacaatttaaagtaataatataacaatttattgaattgttatattaccagataggtaagctgaaatgaatgacagcagtgttataagacacaggagaaaagaattgggaatactttgttaaaatgtacctgcagtacctatgtagtggtatagtgttatttgaaggtggacttagttaaaaatgtatattgaaaactctagggcagtcactaaaatatgtacaaaagtatgattgatatgagaagagataaaatggaataatataaaatgctcaattaagccaggaaaggcagaaaaataggtgtcaaaattaaccaaaaaaatgcaacaaatggaaaagtaataaacatggtatatattaatttgactacatcagtaattagtttaaatgttagtagtctaaatatgccaattagaagatagagatgataaaaaatcaagatcctactatatgttgtctgtaagaaagccactttaaatgtgaagactcagaaggttaaaaataaacaaataggaaagatgcaccatgctaacactcatcaaagtaaagtgggagtagctatatgaatttcacacaaagcggacttcagaaaaaggaacactatcagcgataaaaaaggatattttataatgatgagggggtcatttctcaaggaagacataacaatcctatgtatgtatgcacctagccacagagcatcaaaatatgaggcaaaaattttatagaactgaaaaaaagaaataaacaaatctactattgtagctggaaacttcaaagctcctcttttagtcactgatggctgaagcaggcagaataacagcaaggatatagttgacctgaacagcactgtcattcaatatgatcaaattaacatttatagaaaacttcatccaacaacagcagaatacatattcaatgttcacatggaacattaaccaagatagaccacattctggtccataaaacacaccttgacagatttaaragactgaaaatcacacaaaatatgttctcagaccacaatggaactaagctagaattcaatagcagaaagttagctgaaagatccccaaatgtttggaaattaaacaacacactcctaaataacatatgggtcaaataagtctcaagagaaattttaaaatactttgaactaaatgaaaataaaaatacaccaccaaaatttgtaggatgttccaaaagcagtgcttagaaagaaatgtatggcattagatgcatatattagaaaagaataaagtcaatatgcaagctttcatcttaggaaagtagaaaaagaagagcaatttaagcctaaagcaaacaggaggaatagaaatgagaacagaaatgatgaaattgaaaacaaaaacaacagagaaatttttttttttaaatatcctaaaagctacttttttttttctccccccgtaagattggtaaacagctagctagrctaatcaagaataaaagagaaaagacataaattacccatatcggaaatgaaagaagggtcatctcctcttcccatggatattaaaaggataataaaggaatgtgtgaacagctctattttcacaaatttgataacttaggtgaaatggatcaatcctcaaaagacataaacaaccaaaactcacaaggagaaatagtctgaataggtctatatctattaaagaaattatttaaatttaatttaatttcttttataaaatatttaatgtgacttttacataaattgtaaatatatttacacatttatgtaaatatataaaatattttaattatataaaattatttatttaaaaatttaacaaattactaaaaactatttataaccttccaaaagaaagcaccagctctagatggcttcattggtgaattctgccaaacatttaaggaagatataataccagtcttctacaatctcttccggaaaatagaagagagaacactcattctgtgagacaattactccaaaaccattactccaaaaccagataaagacactgccagaaagaaaacctatagatgaacatctttaatgaacatacatataaaaatccttaacaaaatattagcaaaatgagtccaacaatgtataaaactaattatatgccacaaccaagtgtgatttattccaagtatgcaagtctggttcaacataatgtaatccatatcagtaagccaaagaagaaaaatcatatgattatatcaattgatactgacaaggcatctgacaaattccaacacccatttataagaaagcctcggcaaactagaaatagagggaaatatcttcaacttaataaagaacatctgcaaacaaacctcagccaacatacttaatattgagaaattgcgtgctttcctcctaagatcctcttaaggataaggcaaggatattctctcttaccactgctattcaacattgtactggaagtcctagctagacaaggaaaggaaataaaatgtgtacaggtcaagaagtttggtaggctaaagatgactcctgaagataggttcacatcctaatccctggaacctgtgaatgttaccctctttgggaaaaagagctgttgcaggtgtgattgatttaaaggtcttgcagtgaggtgatcattctggattatccagatgggctgtagaaggcatcatgacaagtgtgtaagaaagactcagagggagattagactcataaacaaaagactgtatgaagacaaaagcaggaattggagtgatgcagctgagaaatgctgaaagccattagaagaggcaaggaacagattatccctagagtctccacagagagtatggctctgctgacacttttattttggatttctggcctccagaatggtgagagaatacacttctgttgttttgagccaccaagtttgtgatcccttgttacaacaacaataagaaacaggtatgagaagaaagatataaaactgtctttgtttacaaacatgatcgtagaaaatccccccaaatcaacaaactcctgaaattgctaaatgagtttaccaaggttgcacgatgcatggttaatatacaaaattcagttgctttcctgtctagcagcagtgtacaattggaatttgaaatttagaaaactatttgcaaaagcatccagtatccatggattccatatatttacagatatgtgtatataaatgcattaatatacacagatatatttccctgctcagtcagctaggagagctaaaagcaagaacactagagcagcagtgagcatacctagcacccatatagtggtttccaataccattctccagtaaaaggagccagggctcattggagaaatggcttataccaggactggtgcagaaaacacacaagataagccctgagcatcttctagtctcagaaagtaagtgcttaaaaaacagaaaaatccacatgatgcaaaggcatacaggaagcaactgaaagagctcccagtggccaaagctggaaccgtgtgaacaataaaataaataaggtagtgaggaattatawacccaagtgtaaaataaatatcttcaagtgtatactgatattaagtaaattattttaaattttaaaatggagaggacacaaaccttcccatataaaattccaagtaattatgtagccaagccccygctcgaggaggtggattataacttcccactccttaaatgtgggatacccataatgacttcttttcaaagagtacagtatgaaaaatgggggaaaaagattagctttacagtggagaaaccgagccaacactaactacctcagccaagtgctcatggtcaacatcaacagtggtaaatcatggtgctagtatgtgcccttgacataatgtgattaacatagcagtttccctctatggtcttaccaaacctataacctcagtccagtgatgagaaaaacatttaacaaatcccaattgagggagggagagtattttgagaatactgaccagtactttcaaaactgtcaagatcatcaaaataaaataagaagaatctaagaaactatcacagccaagagcaatctatggaggcctgacaaatgtagtatgctagatgggattggttattgagtcatactaaaaaaaatctataaagtgtggactttggttaatagtatatcagcattggttccttaattgttacaaatgtaccataattatataagatagtaataatagggaaaactgggtgtggggtatatggaaactctgtattatcgctgtaatttttctgtatattgaattttgttctaaaactaaaagattatttaaaaataaacaaactggccgggcgcggtggctcacgcctgtaatcccagcactttgggaggctgaggtgggcggatcacgaggtcgggagatagagaccacggtgaaacccggtctctactaaaaaatacaaaaagttagccrggcgtagtggcgggcgcctgtagtcccagctactcgggaggctgaggcaggagaatggcgtgaacccgggaggcggagcttgcttgcagtgagccgagatcgcgccactgcactccagcctgggtgacagagcgagactccgtctcaaaataaataaataaataaataaataaacaaactattttgttctgagccaccagcccagttttgttactgggactggaatgaaacacaagattattttcccttcttcattagtcagttaaaggtggaaaatactgtagttttttttttcttggtagctgtgtccatccatctagaaattatttattgagcttctcctgtgtgtcgtgctctgaggatacagaagagtataagaaagatgcagcacctgcccctaaacgtccagaaaggggcatagacatgcaaataatgtgtgggccactgtagctactgctgggctactgttgctgccatagtagatcttctgctttgctctcccaaatatattagaaagagagtgtccaccccgcccttctgaaggagtttggttcttttgattaactttagatggtgtggtttttaagagatcatgccttgttttcagacctccaaatgtagccttggtctttttttttttttttttttttttttttttggagatggagtctcactctgttgcccaggctggagtgcagtggcacaatctcggctcactgcaacctccacctcccaggttcaagcagttctcttgcctcagcctcccgagtagctgggactacaggcacccaccaccatgcccggctaattttttttttttttgtatttttagtagagatggagtttcgctatgttggccaggctggtcttgaacttctgaccttgtgatctgccagcctcggcctcccaaagtgctgggattacagttgtgagccaccacgtccagccagtagccttggtcttctgtcttaatcttctcttccaagatgcttaagataatttaggtgatatccattattatacccaaaagccttctagtgaatcaaaagatgccacatattagaaaaacacatcttgatatcattatggattctttgggggatgtttccctcaccttcttacatctatgtggaggctttaatctcttctttttgattgtctcatttttgatgttgtaggcatcaggcacctgttctatagtctgttcatctatgcatttattaatgaacttagtatatgcctagctcaaggcctttacactttgttttcctgcttgtaatgctatatctgcacatttccttcattcaatctctatttggatttgattaattagagatgctcttatgataactctttaaatatagctgcccctcaccaactccatcactctctatctcattacattgtattatatttctccatagaacttatctccacttgacatttgtttctttattgtctttctcttctagaacacctgctcacaaaggcaggaactttttgttcattggttgctctattcccagcagctttagagcagagtctggcacatggtagtactcagtaaatatttgttgaacaaatgcatgcatggtagtcatgtctccactttctcccaggcagccttacagacccaaagaaatgaaggcttccagtgacctgctctgatgcatcagtgtccatggaatttgtacagattgcagtcctacttaagtccttgcttcatttctctttgtataataattgacagttttcaaagtgcttgctatgcgattgtcccttttgatgctttgtgtaatactatgaagcaagtgggaatttcttagacctgtcgtacaaatgaggaatgtaaggggatggaatttcaaaggtaactatcagagccagagctagaaaccagatctcctgacttctagctcatttggtgattatgcggggtttacgtttcatctccacccgtgtctacattgtatggttttgagggcaaggtcttgaattttttgtatttatatttttccatatgccttatacacagtgtgcttaataaaggtgtgttgctttgggcctttaggccacttcaacttttatctttgacttcgttaatggactttgggaggatctcagagacttgttttaggtatggtgccacagattccataggttagggccatgaatttgcacacaaatcacctaggaactttggttatgttagattctgatttagttggtctggtgtagtgcctgagattatgcatttttaacaacctctggtagtgcccatgctgctggtacatcttccacactgactatttcagggccttgtaacacgtgaaagaggtattctttgtttggctatctgactgtgtgaacctaggtaagtttattggagacgctgtgatgtattgtttaggctagattactttggttaaaatcctacctttccatttactgtgtgatctcaggtaacttacttaacttttctgtgcctcaatttcctctttaaaagtagagatcgtattactatgatctctatttgtagctcatgcaggtattgactgaattaatacttgtaaagcatctagattcataatgcatggcactcaatgaatcttaactactgtgatcatttctttgtctccttgtgttattttgttaaactacattaataggtttaagatacatttgaaggaaggaagttgtttaagatatttgcaaggtatgaaatagcgtggtctctttcatggaaatgctaatctggttggaagacagttctttcattaatgaacaatgcaatagaaatcagctaatggtgattcttcttgagctgtcacaactgtatactgtgtacttttcattaagcatgagcaaattaggagaaaatgagtaggcactcctgttttgtagtaaaatgttacgatgtataatattaagcatagggcataaaattgtttttattcatctcagttatgtattaaatgaaccaacttgattttaattggcattgtggaaatatggaggcaagagtatcagaggtcagtgagaatatatttggtgcctaatacagtgatggtaagggggaaaaagtatggacataatcattttaaagggagattttggttttagtttttccaataattaatgaaaaataacattgggtttcttcgggaaaaaatttacacaactcatttctcccactgactcaaaagtgtaaaaaaagaatctttaattaacatggagtttttcctctttgttttaggatcagattttattaagacctctactggaaaagaaacagtaaatgccaccttcccggtagctatagtaatgctgcgggccattagagatttcttctggaaaactggaaacaaggtatattattgccagcaaatctttcttcagagtaaagataatgttatttataatactagttacagccacaataactgtctttatatggagaagttgtgaatgaattacctttattaagataaatgtttaatttacctttcattataaaagaacacactgatggagaaaaattgtgatgaacagaaagtgagttgtgagtgtgggagtgagtatgtgtgatcaagatgtaaactcactttatgtccttttgttaaccgaagacaattttgtcactgacaagagattcctaaatgggttctttaacgaactaattctgctgcaacacagaggctttctcacaaggcgttggccagtgaaaacaggttaatgcagaaattaaacttccttgaggaatggaaagaattgcagagtaacatttattgaatgataagctgtggtggtgatatgaaaggtatgcaatataatgggaaacaatcttttcctgtcattattgaaggacacacataaattggtttttctgttgggaaacccccggtccagaaaaacttattacttttaataatatgaggtgaagagaaaattctcgaggagatgaacttattaaacaaaataatgaaatgctgtgaaacagcagggaaaaggtagctagacgttatatagctcttgaattaaatatcaatttttgcgttttatggaagttggatgtgctctttggaagactgttaagctgaggagggtgtatactagtttttgtcagcttttcgaaaaatgatacatattttttgaaacatatgaagttaaaaggaaaaatgcgtatgagttgcttttttaaaaatgagtttggattttccttttcatctcaagttacttgtttagctgcaaattatctcaaaggatttttttttttacatgattggagagcaaggttgtgtgtgtgtgtgtgtgtgtgtgtgtgtgtgtgtgtgtgtgtgtgtttaatgacactttcccttcctgagaggcatcttttaaatccagtctcttgatttgtgccaaatagaaacccaaaaaagacctttaatcctttgtccattggatgtgatgactttatatgtaagtgtagcttcagtttattttggaatagtgaccttttttttaatatactgttttatgagaggaaataaactccttccagaattttctcacttaaaataacttcacatcttaattacgaataggataaatatctattgtgaactacatgagaaagctgacccaactcgaataacctctacctggtatcctttctgcaacaatccaaataagttaaaagagtttttgtttagataagctgtaaaaatgataaatctatctttggtcctcagttgaaactaccaccactcatttgattgtgattctcattcttagccaaagaatatcaaaaccaaatgtgaagcttttcatacttacagatgcctgggcccccatccctggtggttttgggtctggcatagtcttcaggcatctgtttgcattaagttccattgccagggttcagacctgccattggggacccagtcctgttttgttctcaacaaacatttattgggtagttaaccatgtgccatgttaacctgtgttaaatgctaggaatggaaaaatgagtatgttccttctcaggagagctcttagacaacaagcaaagaatgtcaatgaaatttttaagtgctcagtgttccaggccagagtacagagggagggacactttgctgtctttcagtcctttctttttaattgtattgattcttttcctcggtaataaataagtccatcctagttttattaagaaaaagacaggtacaagccaaattgtattcatttaatcatattcgatttcaaacaaataggttctgtgtatgtgtttgcaaatcaggtgcagcctttcgggttgcttgacaagttgcttgggcagcccttagactataaagtttctacgtcattgatttaagggtgttttaaaatgcgataggctagcttccagaccatgattagtgtcactcctgagaagyagaggtttaatatttcataactgatttcattgcagatttatgtcttccatattctctttaaaaaaaaaaaagataaacttatgttagaacctctctggaaacagacttgctgacacaaactgaactgtataggaaatctgtaagaagcactgcctaattgacaaaaatggtcctatgattaacatgtatgctaatatcaactaattgatttttttggcttattctcaacaaataacctcatcctacttaaccccctactaccttacagagtcatagcttgggctccagagtaatagcagatatggttggaatccgtgcactgctactgcttagttgtgtgacgttgtgtaattgaggcagggaaaccagttaaaagacttttactgatatttcctgtgagaattgataagggtctaaactgaaacaagtgagagtgcagtggaaagagtgcatgtgagggggtaaggaaggtaaggaggtagaattgtcaggacttaaatattgattgggtgtggtgtggccagggaatggtggagtttggattaaactataaggtttcctgcttgggttgataatagaatatattcatttaatgtctcccttctctagcattctgttagcagtcatctgctggtgcaaccagtcatagccctgagtgataaaacgtgagagatttagtactcaggctctgaggtgttgttttgaccactaccatctacagattcccaactctactggatagtcaggttcctgaaacatgtaaatccagataatcagagttttattgtatatggaacatatctttcatttcctaatggatccagggacatcatttacgaatatcagatattggctgaattcagctgtgttatgatcaaccttaaagactactggactatgaggagcccctcacggtgtttttctactgcccttatgtaactggtctgccagctttttagaactgtgtgtgcctgcaacttagaaaaaaaatcccacagttaaattggttaaaacaactgtcaactttccttgcttttttgctgccagtttggttagggtaaccttgcagccttgctgattctgtcctttgattttaaatgcacgtgtcttttgaacctcaagatgaaggctgagaagtgactctacaggcttacttgtggaaatgtagaatgagtgggctttgcttttgtgatctgttttcctatttattgacaccttccttgtttattccaggttcacagctatagtctagatggtggaggtttatgactttccaataagtgaaatgttaatgagggttattaaccctcactagtgtctgtttggaagtagtgacattcttccaaaaatcttggaaaagttgttttgtagtgtgaatgagcatgagtcactgatctaagccctttcactggatgaagtgaaaagattttttttcaacaaaagagggagagagagaatcaagactctgataaacatagtactatttttaaaagaaatccaataacaataaagattgttctattctctgccttcccatttagatagggtttaaaccagcaggaggcatccgcagtgcaaaggattcccttgcttggctctctcttgtaaaggaggagcttggagatgagtggctgaagccagaactctttcgaataggtgccagtactctgctctcggacattgagaggcaggtgagtaatcatctctgtctttggaataaattaacaagtgttttttgagaaaggaattgaaaagtcaaattgagaactggagataaaaactcatctgattgacctcatcctacccaatcctctaccttttcttccaagcaaaccgccatcagaagtgagtagsgtggagattctgctgaagcacatactagtgaggctttctaatgaaatgttcattaaaactattyattattatttgatagtataattattaactgatgtgtataattatagaatgattgttaattaaactctgcttttcctcacagatttaccatcatgtgactggaagatatgcagcttatcatgatcttccaatgtcttaaatcagtcaccagtwccagaaaagttctttacgacaatgtttaaaaattatttttctacgtaattgctaaaattatttaattaaaaaattgggcagtaggtaactggcattcctctctttaaaatttctaccgaacttaatggaatggaaaaagcaaactcatccacatgtggtactcatttcaggcacatctgaaatgatcttaattactagaagatctgcactattaactttgtgaagagtttctcctaaaaactttaagtaaaatgttaatggtagctttgataacatcaaattctaagggagaaaaaaacaatattaaaccgcccaagcagtgtgccctagcagaggaaaatgcaacatctcgcaagcgctgctgtaacgacttcaggagtcactgattcagcactaatttcctgctgtgaaaactcatctttcatttttgccgtggataggcgcttttattaattgttgtcctaatgaaatttctgacattgtcatatacaacgatgaatatcattaaaatttttaaaataataaagttcctatagtttatttttttaaaaaacttaaaaattgttacaatacataatgaaaaaataatccattaaacataaaaagaggtttgatcagtgagtctctgaatctctctagttgattccttgggtatatatctgtaaaacaccccagtatgttattaatgaatgcaacttatgtatgtgttctgaaacttcaaattttctggtatagtgaatggaggaaaacagtagatattaacagcacttgctgtgtaataagctttacatatatcaatttatttaactctcatttaatcctcataatagtaaggtaaatacagttaagggttttgcttcttatagcagtaagtactcatgtaaacatccttttatacagacaggggaatgaggaacaaagagtttaagcaacgtgccaaaggttgctcaaaattagcagagttaaaaatcaagcccaagcagacaggctggctcccaagtgcgtgcagtcacccccatgtctccctgtccctcggtacacatagtcaggtgtacataaacagagctccccatcagctgagaggacggtaatctgcctcatggtggctggcttttttgctctctgtctgtcccagcctcgctcttccggagattctgcttgctagcacctctaccacgttacagaatgtgtttctttgaatggtgattttcatcaggagagtctttttcttccctgaatggctctctagttgctcataagcaaaaacctggactggaagtcagttttggtttcatcttctcacctgctgaattctagcctgaactctccctctttctgactttgactccttggtccagtcagttcacatctcttgacctcagtttcttcatctgtaaagtcattgggttggggcaaatgatatcaaagttctttcagacctaaaattatattaccctaaggataattagaacaaattcaagaaaatgttttatggctaaaaagagaaaacacttttgtaccaatctaaattagaatttgcctctcgggagacaatttagcaagtccctcagagcacctctctaactgtaaatgaaatgactaaaataagaatagaaaagaaattctgtttttccccagtgccttagcaggatgccaacttttgacttgtgcctttggatatggtcagtggctccgaacgccatatccagcctcacaatatgctagcccaggtgcccaccagtgcaatggccagtcacctttggagaagaaacattccagaaaaataattacagtctatcacctttgaagctattccaatttcacaggggtttctgttttcctcccattaaacccagctggtcattttagttgatcaagtgaacaggtatcattatcttcaattttaatttatatgaggcatccactgaaattgacctctgtggacaattacagattcacataggaaattaagactagtgagtccctcagacctattagaggctgatgagcatggcctgatctaaaggtaagtaatgttatatttggggggcaaatttattccaaggactgtggggctcttcatctgggaatgtctgcccatccttacctggctcttgaaatcaaatgtaacacagatgactttaataggaacaccctcattaatgttgattgctatgaaaacataagaggaagaggtcatttctgaggtgactatgatttactacaagctgatttgtgtacttcagaacattgggatcagatgctttacacaatcagaaaacgaccttctatgttctgtgtttaaagcttctaagttaataaagcaccctgccttgttgcaattgttcagtaaagcatattaggctttaaagttatttttgaaactatcagtcataatttgggagcataaagagactttagagaacatctagtaacactgtcttttttttacattgagaaaagaagcagactggagaagtcacttgtgcaaggtcacatagaatgtcagagctgatgccagaacgtacatccctaccacatgacgaaatattttacaacacataccctggtctttggaactgaaaattccttgcttgtttatgcaccctgctatacctaatcatgtttgtcagcatgtgaacttaagacttacaagagattcacttttgagtcttcaaaatggtgttttagagaccaaccttctcaatctagcccaagtgatagtttgatagcatggttgatttcatctgttagaatctcagaattttggatgacctctagaactgatttttttaaaaggttgaatgttactttgttttgttttaaggaagaaaaagacacgggggcttgtttggattctaatttgtatacacgtggaaaggaaatgacatgtagtcacaaaacagtttgataattaaagtattcttgcctcattctggattatttgaacactaatgagaaattcagacaaattggttcacatgaaaaataatttgtaaagagacctgtggtagcagtgggaactgttacagatatctggaagtgcatcctcacaacaacataacacagtctctgagcagaacagtttgctatgtcatacatacatgtcttacagaaaccaaatctgtttctttggaaaaattaacttacacttctagtacagagagaagccagcattaatttttcttccatcaacctgatattgtacacatcataaatagggccacagtgcagaggtataaagaagaagaaataatttgagtaggtcttaccttccaagacagtgaaatgttatgcccattttggtgctacgaaaaaggtatgaggtgaaatcaatttctacatttattttcctgatcacactcaggagttctgcctcccaaagaaaatatgtattttataaccaccaccaaatgatcctttttagaaatgaccacaggtaacatctggctgatacataaaatatgtagtaaaaataatcatttttaattaactaaaacctgctcaggagagagtcagaggaatatccatctggtcaattcacacttaataggacagatgaggatcaggatgtttaatgcaatatacgtgaaatacttactgaccttaacaatgaactaaaactttttattgggaaaaagaacacagatgaggaggaagaattggaatatctagaaaggacagacctaaaatttgatatttttagaagtacgtcttgtaaaacaggtagaatataagaaacctaggtcatatggcattagtttctgttttccaatgacagggaatgttttcatttgcacaataaaataaggttatactttattctggagattggcaacgagttttaagaagtgctaagtatcttataagaagtgatgataagtaaaaggaactgggattatttagcctgaagagaagatcaaagggtacttaatgtctgacaatcccaggaaaagttacttctatattagagtttagtaacacagtcctgtatctcctctgttgaagaagaaatggaatttatgctacatgtgaagttaggttagttctaggtaaggactcccttaatggactagaatgtgttattaagaaggtacatcttactattctcagtagtagacttgtctttgtgtttgatggtttagttgtgctgccaaaaaaagtgtttctcaaatggaatcactgggaggattatatgaaataagtctgatctccacccccagaatttccaattcagtaagttagctgtaaagcctgagaatttgtatttccaacaagtgcccaggtgatgctgatgctgtgctccaggaaccacactttgggaaccactacattagaaatctttgcactcaatacctggattccaaattaaatgcatctattaagcagtaaaatccaccagctgcagcacttctttatcatgaagctctaggataaatgtgtatattttgctgcttttcatagccaagaacaggagaggggacaatggaaatgacattatcccttaatcctttcacactaggcaatgaacttgatttcactttgggtttaaaagcaagctttggagcctagaataaattagatgaatttagatgaatttagaatcattatccataaaatctccaaaggattttagcaagccaagattgtaagattcagctgtatttgattctgccagtctggaatgctataatttttggtgatttatttataatatacattaaaatcaagacatattttaacagagcccattctttaacttagaatagataagatgttttagggaatggcatgtttcacagatacttggcttattttgaaagtactgtgtagatggtctctagagcacatgaaaatgttagttccttggtcttttccatataaaagcatgttttaaatttggtttttgcttttaagtgtttgctttgccagtgctatactgcacgtaggtacggttcttaattgtaagcaacagaactctacctagtttaagcaaaaaaaattcttaaatcatgctgtcttacagaatatgtaggatggccagatagtgggaaattttattagaccgttcttgcatcgctataaaaaaatacctgggactgggtaatttataaagaaaagaggtttaattggctcatggttctgcaggctttacaggaagcatagtgctggcatctgctcagcttcagagaggcctcaggaaacttacaatcatggcagaaggtgaaggggaagcaggtacatcacatggtgaaaataggagcaagaggcagaatggggaggtgccacacacttttaaatgaccagctcttgagagaattctttatggcaaagacagcaccaagccatgagggatctgtcctgatgacccaaccactttccaccaggtcccacattcagtattggggattatagttcaacatgagatttgggcaggaaaaaatatccaaactacatcagaaatagaggcagcttggtaagaataatgcccaaaccactctttagaaaactgctcttaatcgcttcttggtcttttggctaagatgaagtgtagacctgatggtactgcctcagggcacttgataccagaacccctgcctttgccttccctgaaagttgggtttatcccagtggccaaagatgaattcctcatgttgatctcttgggtatccagttcctgtctggttatgtctaattgttacagtgttggccacatccctgtaccttagctgcaaaggaagctgagaaagccaagttttggctgccttcttggggaaaggggcatatcatgttcaaaagatagaggatggtcaagcatcatcacagttgtcaactacaatataacgaggtggtactggagagacagttaatgctttgtattaagaaataacttgttggccctctactgtatttctattttcagttagtctctaaagctgaacactgcaaagttgccccttgtttcttggtcccatataataggtccagagaagtcctatggagtccttttgtttaaagagaattgcactcaccagcaatatgccctttcctccaaatatgtacacttctgtttatttagacagctattgacttcctaccaagagcatgatgaatttatttatttctactttctcccccttatcttccttccaaactcatcagatttttgatgtcacgtagcttttataacatattcttgaagcttggaaatgtacttatagctctgttttttattttttttaatttttgagacggagtctcgctctgtcacccaggctggagtgcggtggcacgatcttggctcactgcaagctctgcctcccggcttcacaccattctcctgcctcagcctcccgagtagctgggactacaggcgcccgccaccacacccggctaattttttgtattttcagtagagacggggtttcaccgtgttagccaggttggtctcgagctcctgacctggtgatccacctgcctcagcctcccaaagtgctgggattacaggtgtgagccactgcacccggccacttatagctctattacatgatttatcagctttaataataatctgttctctacagatgagaaaatcagcatacctacccaccaccttgt

SEQ ID NO: 95257 - DNA, 286984 bp, Homo sapiens
aaggggaaaatgaacaagcaagggagatacaaaaaggacagtcagaaatatagccaaaaaacagggttgtgtaaggttacagaaagttggagaagagaatgcttgaggaaggagggaacagccaacatagcatactctcccaagaggttcctagtggactttggtgagagcagtgctcaggagatgatgggaacagaagccctacagagtggtttgaaaagcaagtagaagctgaaaaatatggagacagagtatacacgaccattcaaaaatcatcgctgtgaacggacggtggcagtggtgaaagagagagagaaagaaaaggttgcggccaaggacaagcagggcccagtgaagactttctttccttcagttgtaaagttatgaacatggttaaaaacccaaaggatggaatccatcaaaatagcacagaaaaggctggaagtaatgagctcccgaaaataggtggtaaaattttctttatatggtcgttgagagggagagagagaccattccttgtactcaacaagacagaaatgaattgaatatgggttggaattatgtttactgtcaaggaagataaaaaagttgtcacctctgtttcctctctaaggtagaaggtgaagccaaaacactgaaaagttttccagggcagagggttgaagctttgagatgagtagaaaaggcagaaagtggtcactgtagagtgagatagtgagttaacagagaatggccataggcttcacatatgttgatccctgatcagatttcactcaaatcatcctcttgagatacattaaatgcttactcttataatttttccacattatcaaattattaaccaaaacaggtgaaatctctacatataacccccactcccaaactgcttctcttacagatattcacactaagcaagtgtatctagaaatgtgtgactttcctgttttgccttctctttttgtgttttgatgaggaggatgttttagttttcccttgggcacttcattttctctagaattactgtgccttctttaaattttttcttctatgtccctctgctaagacaggtaataacatcaatctatcagtggcatcccctcatctcttcagagtatggtcttctttaccccttctctcacagttaaatttgaatatatcattagctttgtaatttcagcataaaattgatttggtgtgattgatttgaagtatgattgtcaatgcaatgttgttatacctgctatagtactataactgctgaggtaaaacccttagcagttaaggcagtggattttcaaaatatgcgattaatgttttcatagtttttacatagcacctgaaatcaccatcaccaaatttttcataattagatattggtagctgtttttaagtggcacatatgtaggcactatgtgtgacactgagttgactgtaaatgttgcattgcacctttaatttgaggggaagtaaagaaggaagggaaggaagcatcagcagataccatttccacttagcaaacactatgtcttgctttagctataaattacactcaggttctattcttgcttttcatgccaagctaaagtgaatcactcagtgcagtgatgctaatactttaaattatagttagccaaaaaacctagttatgaagaaaagctaaattagtaaatgatagcaatgtctggaacattcagaaaaaatattttagaagttcattagtcaaggcatttcatataaataaaatatgagataaaatcatataacttaaggctaatgccttttattaaagttttagagcaattaaatgaaatgctagcaacaaacagaatcctagtatatgactgaatgaaggtataatatctaaaaacacgacaatctgcatttctaatgtagggctgtttatcctatagcctgtaatttgtgtccagtgatatatatctgcatatctgctcacactttctatgtatgtttccttatttctttaagtatataattttgtgttgtaagacatatcttgtaatgcaatattcttatttgattttctttaagacatgtaagagtcaagtacaagtaagataggtctcttaataggaatcttttgcggcgggagaggggaatataatgggaaaagactctccaagtaaaagcaaaaatgaccttctttagcgtatttccactgtttttcaagtgcagcaagagtaataagtcttggcagttggaacatgccattcacctgagggctgtcaatcgttctcattttgaaagacacaaaacttatgaattgtcaacacatcatttaggtgagaaaccagtgctcatcaagagaaaaaattaaaacaaatgctcaaataaatagaaaatcaaaatgcttcctggtcattttcttccaagagcttaatacagataatctacagttcatatgctataaaaattgtaacatgtgagatatggacaacaaactgaatggctattacttttccaatggaatagagtctagagaacaattgcttgaatttttctttctattccatataaagtaaattatttgtcattgagcatcccccataaatacaattatctmatactgaaactgctgacagccttgtaggctatttcagtagtggaagccaggactaaacacactcaactacattagaggttgtccctggaggacagaattgagcttcattggcaagggcaccgtaagagttccatttgactcctcattaaacctctcacagggattctagctgcttctctgtgtctgcgcttgcttttctatagaagagatagatgtgaaccacgtaggcaaagatacatttctacatatttaggaaaagatcgcttttcttggtaaaaactaagcctcctatagattttaaaaagaccttccagtttcatgatcattaaccacctttttataattttcaaaggaagtagagagctttatttcaatttgtgagaacttatttttcaatgcttgttttatggcatgtcagagatattattatttttctgtgtttattttttctccaggaaaagtagcattaggggaaaacagttggtgataatgatctcagccttctttacctaacaatgtggttgtcataatgaaatctggaccaatatgtagaagcaattggtgaaacataaattactatatgcactgtatgttgcccctggctgttttgttgatttggagtcttgaaaatagcataataagatttatcatactttggaagtattgtattgaaaaaccagtcaatagctcaaagaaacacaaaacatgctctatgaattgaaaaccccacactgtggatgacacagcattcacattctttatgagaatctcttctaggacactgttatggtttaagtgcaataaaaacaaatgaaagtattttatccagcaatagcaatgtaaaatacttttctctagagaggaaattttctgtgattataaaataatactttcagtcttcagcccatctaaccacaatgttactaataaaataacaacaatgccaattactaatgctttactacttactgtttactgttattgttcctccaaagtggtccacataatatatatatatatatatatatatacatatatatatatatgcacaaagacagaaagagctgaacaaattgtgatgtatgactaagagaaaaacagaaagacgcagcagaatatgattatttaaaagggagcctcattgtgaaagttcttttagcatttacaagattaatttatgatcagaactgctttaaacgccctacgcacatcaggcaaggctatatccatgtatacacacagacatatgcatacacacaaatgaatatcatcatacagacccataattcacagacacattttaaaattaaatgctactccaaagagaaattgttggcatcctgtgagtgtgattgttgcccttggcctatatatatcttatgttctagagattagatcactttacagccacttctgagggcgagtgggaataaaatgctgcttcaggagcgtcaaaataaaaagaaaacatattaaaccaaagttcctataagtgcaatcccaaggattaaatgttcagatagcccgtaagtctaacccagagggagggaggagcagttaacattttctcaaaagaaagaaaatgtccaaaccaatgatgagtggacatgagggacctgaagagagcatgtgatgggaatgtgaaaacaaaagaagcttctaaaagaagacaccaaggataatattctcacaaaaattcagaccatcattctatattttcatgcatatgaattttggtacatatttcatgcatatgaaatttggtacatatatacatatatgtaccatgcatatacatatgcgtacatatacatatacgtatgcatacacatatgtatctatgtacacacatacacatatgtgtacacacatatgtacatgcacacacatatgtgtacacatatgtacatgcacacacatgtgtgtacacatatgtacatgtacacatatgtgtatatgtacacatgtgtatatatacatattcacacttatgtaaacatattcaatctaaagcttccttaagacacatacaaacaacaaccaaatgattagtgtttggccattgctcatgcagcaaaagctgagtaaacacagctctggatccttttctcaggccaccactccctagctgtgtgactgacaaagtctatgcctgaacacctacattcatgaccagggtggcctttcctgtctcctgttgcccaagcatgtctcaggtataaataagttccaatactgacagggcacagcaagggtaatttacatgacaataagaaatgatttctatctgaacagtgcataccagagttgatttcgacagacttatctttaaaaaaatacacataacaaaaaaggagacaagtagtagattggggacccacagcttgaaagtcgttgcttgtgattctaaaacatcccagtaaaattattcacagataattgtttaaaaatataactgtacataccgttgacacttggacaacacagagaatcacgtagttgaaaatccacatataactttgaactcatcaaaaccttaactactaatagcctactcttgaccggaaaccttactgataacataataaacagttgattaacacacattttgtgttgtatgtattgtatactgtattcttacaataaagtacgctagagaacagaaaatattattaagaaaaccataaagaggagaaaatacatttatattcattgagtggaagtgaattatcataaaagtctttaacgtcatccttttcaggctgagcaggcagaggaggaggaagagggtttggtcttgctgtctcaaggctggcaaaggtggaagaaaatctgcatataactggacccaacagttcaaacccgtgttgttcaagggtcatacatgtaaaatactgtgatttttcccccttctatattcagcttcaggtgacccgacacactttggtatcaaaagagaatctgaaatgtacaagaactgcggatttcaaatggaaaaggtgcataattgtgctatttgttcctgggtgagtgtgggacggagacggtgagagtgttgaaatgggatggagataatggaagcagtggggaaggagagaaaatacccttcctatcacacacactcacacactcacactacacactatttctacagtcacaactacccaactgttattgatcctttataactgcaattgagtacagatgtaggaagattgagagggaactgggatctggcgcctggattgctcaagagaggtcagggaaacccctcagaactcctgagacccagagattgagggaggggttgaggcggagtctgcaatgggggctgtccagcagtagcaagcagcgggccgatcctggtggagggttgggaggctgctgtcattttatgggtcggcagccagagtgagagtgtccctgctgccagaggactacggcgggctgggcgcggggtccccgcctctcgctcaccacacagaccccgcgcctcctctggcagccgcggtggtggcggcggcagagcctcgcccactccaatccccaccctctccatccttagtcattaaagaacagcagcgcctggcacgttctyggaggaccccgggcgcagaggaggaaagggagcaggcgcagggggactggaaaggcagcatgcgctcgccaggagcaacctcggcgcccagggtctgaggctgcagccccagttcgccattgtgagccgccgccgggggagtccgctagcgcagccgtgcccccgagtccccgtccgcgcagcgatggggcacctgcccacggggatacacggcgcccgccgcctcctgcctctgctctggctctttgtgctgttcaaggtaggggagctcctccacccctttttcccagcggtccgggcggcagccgcgctccggcgccctcgctctgccgttgggagcggcgcgccccagggcacgatggcccagccgcgggaagcgcctgccgtgcagcctgggcgcacgctttgttgtcctcgcgtgtgcgtgttcctggtggtcttgagaggtagggggcggggggaagaataagggaagtttgctccctccggctttcgccctttgtgctcttttatcgctgctgaaatccacatcaaaggtgggcttgttggatcgtgctttctcaggcaaaatgaggtcactttcttttctggtttccactgcaccccaacgctgcttaacctttccgccctccctcgcacagaatgctttgtcttaattttccttactgctggaattatacactggagagtggagggggactgagctccctggacacaaatggactgccagggctacgttagggcagaattttctttgaataaggagtgtcaggtagagagcttggtaaggattcctctccccaactcctatcaacatctttacaattccttttaaaaagtctccagactttctccactatatttacagatgatattacccctagatttaatggtggaaaaatatataataataaactttttcgtatcttctttggaatgtgctaccctgaggttttactttgagaaaaatgaaaagcaaaggagttgcttttgaaaaatcagtttgacaactatactgtacataaatttttttgaagaaatgtcagctagatgttttcttggacggcgatgtgaagttctgaagtgattgtctatcactcatgtcttcagtggatctactttagttctgttgttagtcttttcctctctccgcaaagcaaactcaagaatgtcgacaggtgacttggagctatcctttcaggaccacagtgataccttccctagaaatggatgccaggttaatggatccaaaggttttcttattatagagtcacttcttgcttatatgcaccattaattatgaatgcctaaaaagaatataatggaacaggaccaatggattaagaacagcattacttttaaatactccatattttcatttatcttaatgaaaaatataaaaaaaattcagggagaaacagcaacagaatgcctaagtaagaccttaaaatatatttaatatgttttaacattttttcttaaattatcaataatcattaattttaaagtatggtaaataataagctcagttatatgtttttactgtaggaggttgttctttcatacacatcataaatgcattagacttattaggttgtctattagtcgttttctaactatttatcaaactgtcacaactattttacctatgcaataattgtcatgaaccaaaaattagaaaccaagtcactatgcattttacgagcaacagctaagagttatatgtatgacatctgatccaaacctaacgtttagcacaactgcaggtttttgcgtgagttcttcataatgagataattccagaaataagagaatgacttggttgggagtgggggtaaggttttgcaattaaaataaaataaatgtggccattgtttgacttaaaactcgatattggaatgagaaaatgcagttagtgatggtgtaatgaaaatgttagtgattgtcatagaggtccagcctgcttcacataataggtatattcctgaacattgcaggtaaatgtaaattatggcaaactgcttccatagtaaatacattggcaaagtttgccatttaaataataattattgtagtgggacacataattttgtaagaaaaatcattttcctttattttatgtgaatgtaatatttttgtcacctgaatataaactatatcagaggaaagaagaaaaaactgtatatattaaataccttctatgtgcyggttttttaggcattttacatacgttatttcatttaatcctattttgctgcagttgacaagagttgttcaaaaaaaatggtaaattgggcacacagtgtaatatcttacatttagaggatagtatattacatggtgcgttgggcacatggtataatctctttataatttggagatatttttgaattaaaggtcctgattaagtgccagtaaaacagatctactcaagcaggttgtgactggaggatgagaaaaaattcattattaaataccaaactgctaactgtatctcaataataaaatccaaaatgttccacgtgtgccgagtcagaaatgaaacattctctcaactctcccttgccaaaataatttccatagttttcactatagttaatacatttttcactactccatatgtgtatcctttatataagagtgaaaattctgaaggaaaataagacagagaaattcaagtatgaggcttaatttacagctttacattttccacaactcaaaaataagcagctggatatcagtggtggaaaagtaggaaagtttgaatgtgtatgaatggctataatcagttccattgagggagactaaatgtgactggccaagaaggtctttgtgccatcgttccttatccatggagcagtgatgagcacatataatcgggcatctcagactgtctaaatcattcactgcacattatgaagctaatatctgcataatttatcttgcctaaacacaatgttggttatgaaaatttttatttttatatcaatattgatggtgtatataaaatagaagaaaaaatggaactctgttattatattgaaggctactaatttcaaagtcttctatggatgaatgcaagtgaggtatttatctggcgagcctcgctgttgtgtgtcttcccataattcccagtgaaagaaatgtaacttcctacacttgtcctatctttactaaagccctcctagaaaatgtcttcctgtatcagtttactcagtataagtactttgtctactaaggtgcaaatcgtggaatatgacatcataggaatttgaagttggccttccctgaaatgttgctttttagtagtcagctggaatatattcctaaactcaagtgcttggcgtgtgtccttcttttttaaccccttctctctatttctttctatttctgcttttaccagagatatcatcaaagaatatcaaatttaaaaagggtcttaatattgtactttctgaaacaggtttatatttaattctataatacatgagtgttatgatactggccattctactcttatccaggggaaatatctgttttccacggtctgtctgcctttcctttcctatgtctcccctcgcaaccccatacacacacacaaagaagtttcacttttcgtggttgaggtttcatccataaattgcacagtgttggcaggtgaaccataatcctttcattttgctggagcagcttagatcctttccatcacaatgaagtttgctgcccttaactcccatgtcatctgactcctttaataaatcatattgccaaccttttggagaaacctttttacatgtgacatccccagtaggttggcaaaggctccctgggccatgcttctacagatgatcgagtaataatccttcccactgtgaacatatgtttccttttgttctttgttttgtgagagactatcgttgtgtgaaggaatgaaaaattcacattacacctctgcctcattttggcccaaaagaaaatgcacatttatgtggataactgattaaaaacaatatgagttgtactttattttaaaatgtaacactatttctactatctaaatatccaacttaaaggtatttaaacgtataagcagatttactcctgaaccttataaatataattctaacttgaggggttgtaaaagaatgtttgatgtcagatacagttgatgcacttaagtaaaacattgtaattggtagcagtgtggcacaatagaaggcttaacaacaatgaccacaagttttcattttcccctaatttaatgcctctccgtacacagtttcagtgatgttgcattttcagaaacatatcccagtgcagtgatgagctttactgtaaagcacttaatgttttcatttaattactccaaatatgttgtaaatatttttgaaataaaggaatgtctactgtaatatttctatctttcatggtgctagtatgtggtgttaggaatttaatagaaggttaataaacagatttaaattttctgcattatataaaagctctgactgagaattatgaaatattgtaatattgacttgtgaacacatctttaaggaaaatataggaaaattatcattatgggagttaaataatcataactacaatgcactcattacattcaaatagtaaaaattttaccaatcacttatattagaatcttattaaaaccataaattaaaatatcagttatttttcccagaaatgtaatattctcagttgctcatttattcattaatgttacctcacctctgtttaatgttattaattaaaaagtagcaaatgacatactaggggaaattgatttttttaacctgtatgggtgacctacaatttcagctagtacccagatatacaggtaatatttttgcctcctcttccacatcaccactccgctatgaccacaaccaaccagaactgaccaagatttctgtgttcctagtagaaatcctcctaatgttttgtcagacatcacccttaagagatgaagtattttctacaccctggtcttggttatccctatggtagtgtttaatccaaggtcgtataacccaatttcttacagaactcttctatagtcatcttaaatacccattatatcagctctttttgctcaaataaatatgtaagttttttttgtgcgctggtgtcattgatttgaggaacccaaacaaggttaatgtggctcaagtaaagtgagcaagagtgtgaatggattgggatgagtgtgaatgggttccttctctcctggtgctgttgactccagcaggtcccatagggtttctatcagccaataagaggtggctcacgcctgtaatcccagcactttgggagcctgaagcaggtggatcacctgaggtcaggaattcgataccagcctggcaaacatggtgaaaccccgtctctactaaaaatacaaaaaacagccaggtgtggtggcaggcacctgtaatcccagttactcgggaggctgaggcaggagaatcgcttgaacccagaaggcggaggttgcagtgagcaaagatcacaccattgcactccagcctgggcgacaagagtgaaacttgtctcaaaaaaaaaaaaaaagtatatgtgaataacctccttaattaaatacctctcatgtaatctgctatcaccaattactcctaatgtttcccttttccaagcttgttctaggtcttcagaacaccaatccttagattttttttcctctgcacattgtacctttgaatttatttctatgagtaagatcatatcttagccttgtgccagaaaagcgttcgcaagtctttcagcatctaattcccgaatgaaagatttcttctttccttagacattctagttacttaaaggccagctcctttttcttctgaatattttaaaaccaccaaacaaacagaagatgtttgaaacaaggttgcggggatttcctgataaaaggtttttttctttcctttttttcaggaaattgagatgaaagggagaaaagtgatatatgcttggaaaaatatttcagaaacagagaatcagaaatggaaataggacttcaagcttgagagcggtattgcaaattatgagtatgaatggtaatttctgtaagaaaatgaatataggggaaattagagaatgaaatgaagaacatttgatgaaaacaaatacactgcaattctatttatatgcaaataaatgtattttcttatcaaatactctttatctatttggtttttcactctttataaataggaatgctgcacagttcatttttctaacaaaactatttctatcttaatgaaaatttaaactaaataaacctatttttaaatgtgatttttggtatatttactagcaaattaaaagaataggaatgcaatttatctacaagtagtggtgcaagatcagaattatattaatagtaatctatatgagatttaaatgatgaatgtttcccttttttgtgctatttcattttactgttttcagataactgagactttgttttattttcctctttctgcctactaagtttttaatatcagtgatttatataacgggtgaggaaaggcgtcatatgactctaccatgctctcaatactgttccttcattattacccgccattgaccaaattaagtgcagaggaatttctgaccctggttctctctacctttaacccgtatcagagaccaattatgagcctgctgtgctgatatgtgtcttgtgattctctcttggttccacgcataggaatttgtgattggcatgtacaaaccagatgtcagagaattcaaaagaattttcagtgccctttgtatcttcggtcctatctgaagcctgattcccacctccctatacttactttctgaatcaatattgtattttgataaactctagtattcctgcttttggatcctggcattaattataattaaccactccttgtcttttagtttccttgaaagagcatcctataaacattttttggctggccaatctttccccaatgccaaaatggaaagattgagaagctccctttcttcttcaatactgtcttttgtattccagaataaagactcactgcccaattccatttagttaatcaaacatccattaagcatctaatatgtgccaggaattttactagatattataggtacagaagtggataatactcagttgagtccctggcagtggcatattgggaacatggacacagatgatggtcattagaatatggtgttttgttttacggatgaaaatgtgggctgctagaggagagacacttaactatttagtggtttgggaaattatttattttaagatgattcctgagctgagtcctgaagcataggtacgagttaggtttaaatatatacacacaaaggcagagaaaactgcacgagcaaaggcccagtgttgtgaaaagcatggcagagtttaggaaaatgcagatatatatcaaaggcaatgaagccacaggagccagatcagggagacttctacatgctgagccagaaagaaggatctctgtattctctaggggaagaggccttatcgaagggtttaatcaaggcattagtgagataagagttgcatttcagatagagcgctttgcctgcaagaaaggctatcccaaaggtagagccagcctggaagaattaaactagtagcaggttgttgaaattatccaattaagagacgacaaacactggcattagggtgacagacagtcaaagagtggcaatgttgaaaaatagctacattggcaagactgattagatgtgggaaattggagagagcaagatgtagggtaatttcttggtaaccaaccctcttgcctggaagagtagcggtctcaagataacatgtgtgctggacagtctactctcgagatcaactgtgctggatagtctgctcttgagatcaactcacctctccactgtgcccagtgccaggaagtgtccctctatggaccatttcttcctgttcccttgccctttggttcctagtgagtttggccaatagaaggcactagccaaagattactgctagaaggagggagaaatcaaatcatttattctcctagcctccaccctggccagcccccattaggcagtggcttcattctctcttccagttctatagtcagcccctcttacaaggctgatgttctggccaaattcctgaaacagttctctgtctttatcccttgagagcaatagcttctccctgcttctagaccctaagtatgttttctccatgcttaatacattatttctgctccaaaccttgatcsctttggctagtccatcccttcatttcattctctgggattttctttttgagtgtcctgctgggaccatgactgatataagacatggtaggtttggtggtagacctttgagtttgaagcagttgaaaacaaataaataaacaaaaacaggtacttgatatgagtctgaagggtagaggagatggaaggcctggagatgtgaatgggatccmctagcagagagaaagggagtgaagggcagtgggccggaagggggtcttgagaggcaccgattgttaatttcaggcaaataaggaatttaagaagttgaaggcacagccagagaggtacagaaggaaagcaaaatcaaggaaacccaagatctaggaaatttcaagtggaggacttggcaaacagcatctaatgcaacagagaggccctataagctaaggtctggaaaatatctttatattaggaaataggtaggctattggactctctggagactgggaggtataaatgcttccgggaattgaagaataaaaaagcagccccttatctgataagagcataggtgccaggtgagatcagagagacctgaagtcaatatcaattctccactatgctatttactggcagtaggatgctgggaaagttatttcacctctctggattcccttttgttcatctcttatacatatgtcttagaattattgtcaggaataaataagaaaatgaccacaaagtactgggaacagtgcctagaatacagtgagcactcaattaatgttatgtataacaataaactaaagagaaaaatagtaaaaataggcaaagtgaagtcaaagaggtagggcaataaaaatgtgtacagagcagcatttcccaaaatgtgctccacagtacactggagaggctggcaatactcttgtattgaatgttattaaaaatgaatacctttgtggtgacatgaatttgggaaattattagtttaactttgtttaaactagtattaacttgtttttgtgtgccagaatttcttagaacttttaatatgttaacacgtattgtatcttccacaggagaaatatgatgtataacattttcaaacttgtttgattatagtatcctttttgtttctctttctttcttttttttttttttttttttgacagagtcttgttgctctgccaccaaggctggaatgcagtgacatgatctaggctcactgcaacctctgccttccaggttcaagcaattctcctgcctcagcctcccaagtggctgcgattacaggcatgcaccagcctgctcagctaattttttgtatttttagtagagacagaatttcaccatgttggccaggttggtcttgaacttctgacctcaggagaataatgaatatgctctaagaaacaatatttatgcttatatgatagatgctttgtttatctttcctttgtttaaaaaattataaatgtaaccttaaggataaagaaaacatagcagcaagatcaactgtaatttaaatctcagaatcaggagaatttgcttggaaagcaatcatcccaactttcttataaaacactgatgttcaggaaaatgcttttggaggaaaatacgtagatatcttccttactttatggactgtactaattctggcttcagtaattgtacatgtaaaatgtttctttgagttttgaatcaaaaaatgaaccatacattttaacatcattttccaatgtaattatcttaatatatagcttaacagaccaatcaactttgttcagtatatatcattgaatcataaagccatattttttcaaagaccatctagttcaaaatttaagctgatgcttagatattgtctctaatatcactgctaattaatcataaatggtgacaytaccaacagctgtaaagtagccattccaccttcagacaacagttttgttgttttgttgatttggtttggtcttgagattaactacttctggttgtagcattcacatgttacttccatctctgtttgactttagtagagcactatatagtaactgctcttgctctcatgcatgttatgaataactgctttgccaacagacctgatggcttataaagataaaatgtgagaagcttgtcatctcactgttctgtcctcatcctccatcacacaactttaagctatttacaccagcctgagttttctgcctattgccatttttttcttttttatagccccaataacaaattgagtagaaaacagtttttattcttcccgagggtgttccacgatgaaccatggtaaggagttgggaatgctagtgtgagaaaaatgcatggcacatagtaagcattctatacatgcagattttatattattccaatctctgctcaagaaacatttttattcagcacttctttctgaacagcctatctaaaatcatccctatcactctaatattttaccactcttacytaagcttctttttcttcagagaatgtatcattcactaaatgacattacattgcatattttatgataacttagctcctctatgggaatatttataggtttcatgacagcaaggactttgtccattgtgttcactgttgtatcctcagctcctggaagagtgcctggcctatggtaatgtccagtgaacatttgttgaacgagtgaatgaatgagtgttgaataaataaatggagtgagggaggtcaaatggaaggtatgggacagactcgagacagaggaatagcaggatgcaggtgtgcaagcacagggagtagagaagctgcacagtgagatgagctaggagggagggtctatcaggcaggcgccactgagtcgggctggggaggcagtggcaccagggtggaggatgacctggagatgccattttgctctggtggagggaatagaggttttattaccacaggtgaaaatgagctcatttagacatcaagataatgttcctgacccttttttttctctttattttatcaggttagagtaaaccactgaggaccaaatgatgggtgcccaagtcataaataggttcccttgtgtaatgaagcaaaagcatagcttttctgatcatttattctccatcgtattcattgactgtgcctataatttacttacttataaaaagtaagtttttaaaatgtaaaactttgtttttatcttggctctacggtttgaaaatgtcaaatagaaacttaatgtgtaaatctttttttctctcaccatgcacgtcatataaccagattgtctctagacctcaaaaggcatttctggaaactcacacaactaactgaagctctgatgataaattattgtttttcttcaaaacttaaaacttttatgatttcctttacttttggaaattttattgtttatttttttaaatgcacatagatacctcacggaaattttaaaaatgactttttgaaaatgattgtcttttcctggataaaattccattacgtaacttcttatagaaacaactggtaatttttatactcagttgaaatactaggtgataaatattttattatgcaacacagacagtgagttaaacatgctgattcatgagtgctacataaagtgttagtacatatagaccaaaaacctgaattgtccagattttcaagtgactaacatacaaaatatatgcttaagacaactgctattacttaaataattcagtatttctctggtaagttgaaaggtattacataatcttgtaatgcactgatctatatccatagtctattaactgtactgaaaaagtactgaagtttgggttagctgtaatttttattctacaactttaattttgtttctgtttgttggcaaatcaatatatcatccaaagccaaaaatagaaggaaaattgtgatcaaattatttacactctcacatacatgactgaaaggagtttttgctcctgcctttataaatttatgatcaggagactcacttctggagtataaaaatagcattaataattctttaatgaattgttttccttaaaattaataatcttctttactcaatatcaaatcaaaatttctggaaacatttgaaaacacatttacacaagtctctttctgtctctggagtggctacactagaattaagctaattgtcacacatcatcctgtctctgagataagccaggaatttccaattttagtcaagttggtgatccataaaatagatatcctagtaaaattactatgagctttctacttactttgatattgtgctgataactaaagtgtaattataaaaattgaagtgttgttactgccaaataccacaaagtataagcatcacacttataataatacatattgacaccatcaccttaagaaatatcttctcatttgaatgtacttaaaattcttagatttttatctaggaaaaaaaattggcttctaaagttcgtgaatgttaagttgattaataagataaatagtaaaagaccgagggaatggtatattgtctccatgtattattaaacattgagtcatgtggtcatctcttaaaggattatagaaaaaaaaggtttttatgaaatgcattggtgtaatagccttatttacatataaacatagtgaggagatgtgcccaagtttattctgcattgccatgggggaatttcctctgcaattttccctaactaaattatactttttaattagtcttttagaactgactataggccttattcaaagtggttagatacttgagatttgtaatatggaaattgtggtattgacaaagctttgctaaaataatcacaaggacttagaactaaatactttggaattcattctaaaaacttagtttatgaggttttgttatttttttttaattagcgaaatttgctaaaactgagccacccttataatgtgtctcagattgcttccttggatttacattttatttatttgcaacaaataaaatacagttgcatctttaaaccctttttccatctctatgctattaccttggttcatttctactgctagattgatgtaacatctttcttttctgaaggatagttgagaaactaatgagaatctttccattgaaattcttgctgctacactgaggccttcaattagcctctttactatatggctgcttatggttttgaagtaaggtattcttaatttgatatctttaagcctgaatcaggtgtgcatcatcatgcacgagaattctgtaataacatacaaagaactggaaaactgacagatgttcacagcggaaaatgtataaaatacaacaggcagaaaaagaatatcatcattcctaaacactgcattccaaaatagctaccatctggagacatatctttccaaatcttttcctgtatctgtgcatttgagtgtgtatgttaaaaaaaaaaaaggtataaaacttccctactatacatgcttttttcacttaaaggtattgtgataatttttttcaagacctgaacattttcactcttctgcaatttaggacattaacccatatgtcaaggtcaattgcatgcaattcccaagtgtatttgcattgttaaagacgtagatgatcatagatacagattgtaaccatgaagtggggaaaaggaatttgttgagcaaagagattgttgtctatgtatgtgcccaccattagtgtaactactgaagaattacacacatagcaaaacttcagaggctatattggcaggcatttattttccattttttcacaactaaacactgtgcataaggaacttaagaataaaggcatgctggttaaaaaaaaagatataggattgaattctggctgtattctttactagctatggcatttggcagtgtactgatctcttcatagaagacaaatcacagtggctgcacagatcactattcctccagcagcccagtctgccatcccaccaggtcagcctacgcccagccttgctaatatcttgctaatcttggaggaaaatttcttttcctctttgatccacatagtctgaagttgggataccattctcctacttgacctcactgctctgggcagaatgaacagccaagaggtgaacacctgacctaagcccatgtggggactgcacctcgctgaccactgtctttggaattggcatgtgatctaagccagaacaatcagaacctagtcctacaattgttttcaaactggcaatggcaggggaggtgaaagaatattttcctttccagttgtggagctaaggcatgagcttggacagtgtcctcaaccataaaactgactcaagaagaaacgttttgtaggaagaaatattttatagcagaaaagaagccagcaggaatagtagagacttcagcaagactatcattcattgcaggaagatgatctcattcctcagactccagtgagtcactccacaggcacttagaaaaattacaaatttactaaaattcaactccatcataaccaagcaggcataatagtgatacttgggatccttatgtaaactgaatcagagtgattatgtaatttatcataccaaccggaacacttccgagagtgaagggatccttatgccaggacagaagacgcaaatcagcctgttctgggaaaaccgtgatggatggttacctcttcctgaaaacacaaacaaacacgttttgtgcagtatgcagtcactagttcctcgcccatctcactcatccatgaaaatctctgctctaagatgaactaaccatagaaaaggaattgcaattatcttaaatcaaaaactaaaacctgtacacacatattcctagaaacttcctactagcccagaactgagaataaccaaaatgtccttcaacaagtaaaaagtttaaaaactgtggtgcatccataccatataatattattcagcaatgaaaaggaatgaaccattgatacacatagccacttaaatgaacttcaggaaaataatgctgagtggaaaaagtccatctcaaaaggtctcattctgtatgattccattatataacattatgatgaaggaaagtttcatggttgccaaagactagggattaggggaatggggaatagctgcatgtggctaaaaggggctaacatgaggaagccttgaaataatgaaacagttatatatcttgattgtggtggtaattacataaagttatacatgtgataaatttgtaagatctggacatacactcacaaatgagcacatatgtaactggtgaaatctgtatatgctctatgagatgtactaatatcaatttcaccttttggatttttcttgttttaatatgtaagatatcaacattgggggaggcaggatcaaaagtacctggaactttcctgtatatttccttgcaacttcgtataaatctgtagttatctccargaaaaatgtttttaaaaactttattaggtttttcaaagcttgctttgttttgttttttgtatgtgtgtgtggcactctgctatgtattttaacagtggatagatatagtctttgtcctacagggactgtttcagaaaaacaataactacaattgcagggaaagtaagttatcgaagcaaatttgaagcacctaggaacatacacaaaatacacaaagacctcaataaaacaccattagctgcaaactcaaatttattatgaagcacgttgtatattggactatattcttaccaggtttatctagaaagttcttgaaaggaccaatcattaaggcattccccttcataattcccacaacattgttaaaggcaacattttaatgactcttcagagaatcagataaaaaaggaaattaccactgtaagaggtaagggcaaaatattaattgataaagtaatattcttccattcttttagtaattattaagtagcatatctggaaatggtataaataagtctgaacaaaatagaaagtataagataagcttacaaggtttgagtaaaacaggagcggagtagaggaaaagaatggatgaagtattaatgtgaagatgaatacatgttcagatatttccaccagtcaatcatcaaacatgtatkaaggtaaacatgtaaggaaggcactgtgttcctcattttaagagtacaaaacaaagttattttgctaagaagtctgtaatacaagtgaaaataacaaacatgtaagaagctaaagggcaatatatgagttaatactataatagaagctttgaagtattaacgtattagtttataaatgaatgagaaagagaactgtattgaaataaatgtccttgcattcagataaaggaaaaagctcttgggctggagggagcactgatttcatgaaggaagacaaaaatttaatataagtccaatagagtttaaacagttaagagcaggttaaggaaaacatttcacattggagaaagagaagaacagaagtagaaacacgagaaaatgtaagttatgtttaggaggcttgaataaaacagtggggacagattcaggtcctgaggaggatgagtagttggaaatgaggttgaaaaggtggttttgcccagccatgaacttctattcataataatctattcaataatgctgcaaagggaaacattaaaatgagctttagttcagcagtggtgtgcaggaaaaaaattatcatacctcattttagctttaattgattttataattccaaatttgctgttaaatgcaaatgcttaattctaaatacgtgtgctctgtcttaattagataaaataatcctctgttgcttgggtagttcagtaaattagtccctagacttaaactcccctggatcatgttgtttatgcattaatcggtatgcactcttagagataaatgaaaaataaatggattttttcagagacaagttgtaactgtcagcatactttcaaatttatatcctctgcatgtgactaaaaatttgccatcgtttactgtagtaattacaattcatatatatatgctcccatacttgtagaatttcttctacatgtttgtattttatttaaaactacatgttgctagccaaagctaagtagagaatctaaacctcaccattatgtacataaccatgccaccaactcaacaatgtaggttctatctgcatttgtatataagatatgtcccaaaggaactaatcaatgtaggtaactgaagcagaaattaaatgatttagttcttccaagcctcactgccttattgataatgatggagatgatactgatgatccctaccattgactgagtgactgctgtttattggggacattcctaggaactttatgtacattatctcatcgaatccttatacactcctatatattataatcatttcagtaatgggcaaactgagtttcagggagaaactaaaggagttaggagtgaaaccttggtccatttgaccacagaactctacacacactgtaacataccatactactttgtgtgaaaactatgacacggcttgtatttcccctttattggtctaccacttcttcctcttcctcttactacggaaatatctcgagacacaggtgactgaatcagtccttggttgggactgccttttggacagaaatggggtagggatcactcctggagacagctgattcctgcccatccaaaatcattcttgcggtttcttttttctgtccgtcaatctgtcaggcacatgttcccagaaaaaagtctgtatatcagtggattcctatatattcgtaaacgtcaggcttattcttttgttttttatcttcttcagtgtaatagatttgatgcttctgtactctgtaagataattacacagagctgaatgtaatgttacgtgctgatggggagaactggtgttttaaattcttttaaatctggagcttttatggtcaacgttagaagcaccatggcagacttatgcyctggctttagaagcctgtatgagattttgtgacttgctggctttatgagacttttacacctcagattggcctttccctccaagaaagataccaccagacaacaacaattttaacactaatgtcttccttttgattacattagatttgcaaattaaacagattaatagtagtgttctgtgttcctctcagctcttctgtttaatactcttatctgacaaagtgtaaatagaagacataattaattactcattacttgcatgtcaagttgcataaaaaattacatccccaggaggcctattattacatatctgactgttcagtgaaattagttttgcaaagaaaaagcataccttaaggtaagggttttgtttgtttttcttttctttttatttaatttattagagtatctgcaaaaaattgtggaagaacaacattaactcttaatacacaattaaagagattaattcatttgcccaaggatatgttatttttccttttttattttttagtttgtccatgagatattaaactttgcatttgaaagttataagctaatgatgcttctacaaaaggaagaccccagaatatgcctattgtctctttagtatatatcccacagagaaagttattagttaagcaggctatgtcataccccctcctctgtaaattgtctcaaccttgagctgggaagtgtactgccatgactgaaaaaaatagaataattttccagccatttcttgtcttatctgtctagagttgatctgaatgaaatgaggtctctgcttcaactggagagctcagcatttcatatttagctctcaatctgtttcatgataatttttgaaggaacagactgcttatgacaaaatgtgctgtactattattaaaggcatactgcctttatagagttccatcacttgaaacaaagtgctggctgggaagaattcttgaatgtgcatatcttctgaggttttttaacagctattaaataaaatatagtatgtgcctcaggtaagagaaaaccaagtacctgattaaaaacaaaacaaaacaaaaaggtcgtagcattgtcaatagagcaaagcagcataaagcaaagattacctgcctgcaatcacttagtcacttcacctctctgtaaaaatgacaatcataatcacctctacctcgcaggattactgtgaggtctaaatgagctaatctgtgaaagcactttgtaaactgtaaagcacaatttaaatacatattatcttattaaaaatgtctgcatcacctgtttcattgactctgggacagagatgttttcttttccacatttatgtgtatttgtgcatgtgtgtagtgtgtttcgtggaagcctttaattaacacggtagtactttctttttctttttataaactaaagtttgccatacccaagtgcactttctgtcacctgaagtcacagcttaattatgtgtctggaatgacttaatatataaaagtcataaaaatttctgtctaatggcaactatttttatgttagccctgtcttttatatactgaccagatcattctcattaaaaattgttgtttatctaatttcatacccataccacccagcattctatttgtacagtgttttatgtctatgatcaccaatcatctttcatatgttatatttgagcataatttattctttctttctatgaacatttatagagcatcaattgtgtgccaaatactgtgctaatcattcagtgtctccttggatttcacttatctgtaggtaaaagtgattacatatttatartaataactccaattacagtgcagttggctcaaccagtacacacccaatatcagcctttttcctatgaagagccctcacaggtgttgctcagtgcccagtggggctttgctgtggaaccctagttctctgcccttccagcctcgaagttttcctgttagacatctgccctgctcgaccaggtgctaccactgccaatcccagcaccttccttgatgtacccaaaatcttcccatgccttgaaaactaagcctttcttagtatgtcaagctgttgctttggggttttctttgttagtttggttttcccattgcagtttgtcagctgtgggccgataggtttctggaatttcagtgtcaccaattattcaggtatgtgtacctattcaggtatgtgtaccagaataattgtgtgtgaaggtgtgtgaagtccatttaggcacaagctgggatctccactcccgaccccatcacattaaaaatagcaaaaattacttatctaattttatcttcctctcatttgccttgtccatcttctagttgagttgaataaactagtggacagtgaaataatcaaatgcaggatagcatacaggaagatgaaaaacataaatataatctaattttttaaagcctgtgttaaatttcttctgcttgtaaacgttttgaaatcttaattgaatatgaaaatagatacaaggtaaaaagtttatttttgtttgatactgtgctccatgtatttatttctaatttccacagtggatggaatattagaaattattgaaagtcctaattatctcaaacatttgcattttacgttaaatgtcctaaataagcaaccatttaatatgaatttaaaattaaaatttaaaggctggacgcggtggtccatgtctataatctcagcattttgggaggccaaggcgggaggatcacttaagtccaggaattccagaatagtttgggcagtatggcgagacccctatctctacaaaaaatttcaaaattacctgggcatggtggctcgcacctgtagttccagctacttcagaggctgagatgggagaatcgcttgagcacaggaagtcggggttgcagtgaacatgattgtgccagtgcactccagacaagatgaaacagcaagaccctgtctcaaaaataaatatatatatattttttgagacagagtctggagtctcgctctgtcgcccaggctggagtgcagtggcgccatctccgcttactggaagctccgcctcccgggttcgcgccattctcctgcctcagaccagaggcgcctgccaccacgcccagctaattttttgtattttttagtagagacggggtttcactgtgtgagccaggatggtctcgatctcctgacctcgtgatccgcccgcctcggcctcccaaagtgctgggattacaggcgtgagccaccgcgcccggccataaataaacaatctttttaagaaaagtttcattctttatagaaacatatcctacgttgaacgagagttttaatgtgagtctacataatcattgtcaggttctaactaaaaagaaggcaaatataaaaaccggctttgtcacttgaagaacacaagaaataataatgagaactatgcaccatttcacaattctcacacttgaacattgttaatgttgaagccccaggattatggaaacactggaaatatgccacactgtgatcacattcatttttagaattaatagtaggtatcatccaaatggttctaaaatacattttttaagtgtgaaatgtctttcacaaatatggccatgacttttcagagcactcttttgcaaataaataattctggatagccaaattctactagacctccctatacagaaatctcataaaactcagataaatgcaaataagtcaatgaaaagaatagctctctatcttcctcctaactcagccacttaagactaatattgcctctattaaagagatgaaagcaratgtggtatacattattgatattgctccacattgaaagttaaaacttttatatatgttctctcagattatataaaactcatataaaatttacttaatgaagttttcaaaatagtgtatgggaaaaagggtaagtttgtgatttcatggctgttttcatatgctgatctgaattcaatgtcgtctctctcttttcacaaaccatctgggagattgacaagttgcatctcaccagatggcctaccataccaacctcacacttccatggcaccatccctccatgataaatcctgaaatgctttaatacaatgttcctgctcgggaagaactccacagctcatgccttacgaaccagttcatcgtcacccacttcatttcccaaggttgaaatgggatatgatttccactgggtgctaaattattctatggctcagaggaattaagtgatcccagctgaatacaccaccaagctcctatcatcctatctttctacaatctcttttcttattctctgtttcccttactactccctggcctattcttttataacttacactttacagagagattccattcttttttcctctccttttccatatacataaatcactggaatgtatactttaaagtgtcagaaagcaatgacagttttgagctgtggttcatgtcttcctgaacctagcatgcagatagttgatactatacaatacaaaactgaattgtctgtgtcaattattttatagtatcactacatatttaaaagatactataaagacacatgcacacgtgtgtttattgtggcactgctcacaacagcaaagacttggaaccaacctaaatgcccatcaatgatagactggatgaagaaaatgtggcacatatgcaccatggtatactatgcagccataaaaaaggatgaattcatgtcctttgcagggacatggatgaagctggaaaccatcattctcaacaaactgacacaagaacagaaaaccaaacaccacatgtttgcgttcataagtgggagtggaacaatgagaacatatggacacaaggagggaaacatcacacaccggggcctgtcggggggtggggggttagcattaggagaaatacctaatgttgatgattggttgatggatgcagcaaaccaccatggcacgtttatacctatgtaacaaacctgcatgttctgcacatgtatcccagaacttaaagtataataataataataaaagatactgtctgggaagagattcttaagaccactcattcttccttttgcctttacaaatgtcagagaggcactaaagaacaaactgtgaaggaaaaagacctgaaaaaatatcttttttcccctagcttacagatcaaatctgacctcaatatcttcccccactccctcccctacttttcccctctgagcctctctcataagttttataaattcttccagtcatttagtgttcaagaagagagtccaaatcagaaactttgcttaatatgataggtctcatttctctggtgccttgatcatctttctttaaatagagtgaattttagcttccaagttattttttcttctctttcttgacttttagactttactgtgtctgtattctctgacaaacatataaactgcttatatcttcaccctcatgttttgcatatcaaatccaactatctgctaaatttttcttttcatttagcagtaactgactaccataaatatactatcactgtaagaacaaaccatgtcatagagaagtttgcctccaggaactttatttcaaatctttttacttaagttttcaaaatgctactttatatgttattttatttctcccattgcatccccaggttgggtcagatgacagtatacctgcatcatctttatatgtggatatcagtttccatttcctattctcccacatgcagagctgcaagaagttgtctgcagcttgttgggcacataaagatctttatggaacaggctctgcacaatccaacataatattgacctcagagaagtttggtgctttccttgggtgtgactttgtcgactagaagattagccagtgtttctcaagaataccgaatggtctatttggtgtagataaaaagagaaattgtgatgattaatgaaagaggaatttttgatacggaaagaataagattagttctgtcatgaggatagggagaccaacagctaactcagttagttaaaggataatggaatagagtaacatgaaaatctgtcatcttacttccctgcttaaaacatacaaatagattttcatggttcttcagataatgcccacacttcttcaggggtttaaagtctttcatgatctgatttattatcactttgttagtgtcatctcttgtcaattcctcacctttttatgctgtaatctttctgaatttttctctgttcctcacacttgatactcattctcaccttcctctaatcctttgcatataccattctctctgcctggaaaattcctaactctacactctccccttaacccaacaagtggctcctcatcctccaggtctcagctaagatgatactccattcacaaatgcattcctgacctcctctcctttaaaaatgggaggagtactcagttttttcctcctcctcagaaaccttccatactccatccttaattggctatctggaaaagtcctgtttatttatcaagacacaacttaaaacagttttctattctttgaaaccatcccagcctcactcaagtgtagttgattcttttccttcttaatacatcactataacttgaagatatgtctattattaattaaattacactgctatgacaagatttccctgtatatttatattcccaaccaggcaataaatatgatctccttaaagaaagagactgtcttatattcactattatcattttacccccaaatatactctttcctcacctgcttatcttacagatgtaattaatttttagttacctatctgttactctgtaagccttctaagggagggaccatgtttaattcaccactctttacctaccacgtttcacaaaccttggcacatacagacactcagatagttttagaatgaatgtatgagcttgtatttgtatacaaaagataaatttttctgcaagtattaacaaaaaaggactgaaccagagactcttagtagttttctgtagcctttactaatgttgataatatatgataaattggaggtcatagaaaattcatctggtctatttagttacaattcatttgcatggccccatgcagggcagagatctagaaaaaataacacttatgaaaagttatgacaaataaatcagatgagaataccagattatacaatttacctatggccctaaacatagtctaatatacttaaaagacagacatacttaatatcatctgcatacattttttttcaacaagcattatttatagatcatctaaaatatgctaggctctgctgataggaaaaataatgcatcccaaaagatgaccataccctaaccctaaccgtaactgtggaagctgtaaatgtgttttcttatatgacaaaagagactttgctgatcggattaagattaaggaccttacaacagcaagattattctggaatttctagctgggctctccaatcacctagttccttaaaactagaagaggaaggtaaaagactaggtcagggaaacggccacagagagactcaccctaccattgctggcttggaagatgcaggagaaagggcataagccaaggtatgcaggcagtggaaggtgataagccaaggtatgcaggcagtctctagaatctgggaacagtcctcaggtgactaccagcaaggaaatggcgacctcaatccttgtaacaggaagaaactaaattctgccaacaacagtgaaggagttaaaaaaaaaaattataggccgggcgcggtggctgacgcctgtaatcccagcactttgggaggccgaggcgggcggatcacgaggtcaggagatcgagaccatcctggctaacacagtgaaaccccgtctctactaaaaacacagtgaaaccccgtctctactaaaaatacaaaaaaattaaccgggcgtggtggcgggcgcccgtagtcccagatactcgggaggctgacgcaggagaatgacgtgaaccccggggggcggagcctgccgtgagccgagctcgcgccactgcattccaccctgggcgacagcgagactccgtctcaaaaaaaaaaaaaaattatagagcccctagaaaggaacacaactcttcttctgacaccttgattttagcccagtgagacccatgccagacttctgacctatagaattgtaggataatacatctgtttcaagtcattatatttgtataaatttgttggagcagcagtagaaaactaatgcagcactgggctaaatgcttgggagagaacaataaagagctattcttaattaatgtctcttttttatggcatttttaaagaccatagaatagtctgacctgcaaaacagatttatggaacaagtaataccgatacagtataataaaacttatagtagatgtatataagttttatacttcaagaaatagtgatggaattaaggaaggtgttaaatctatttggagtgggatcagggaaaatttcagagaacaaaccattttaagatgggtccttaagtaataaatactagttttccaattggctagatgggggtacgatttagtaccatgttaagctaagaaggagtgcaattggagatggatgagtgatagaagaatgagtgacatgaggacttgtttgtcccacaaaatgtatttggatgtataatatggaataatttgcatctagaaagtttgctccagctgcaaatggggaatggaagaggggcaacactgtatgcagagactrctaccataggctgagtaagaaaggatgaggtctctgttttataatagcccccatttattggaacttggctatgtgtcagcaactataacaacactttacatatataattccatttagtctctgttagttagctctgcaaagcagatgccattccatctcacaaagaaaccaaagtttacacaaatgtgcccttaaaaaagaaataccccacaaaaagctaacaaaagtaggattcaaacccagttgttaatcacattaaagcctgtgctttaattcactctaccatggcaggaacagggaatcaatataagaagacagaaagagagagatttaataggtaaaattaactaagcttattattgattacacgtaggacaagggaaagagaggaattgtagcttactgatagtttttggatttgagttctaggggaaaggagttccagctaagatagggaccaaagtagaagacactttctgagtcaggaataaaagttaagcttcggatgaatttaaggtgtgtattggatagccaggtagagatgcccagaagccagtctggaatttagaattgggacatggactgaagagaaggatttgaaaatcatctacctgtaggtaactttcatggtctggaacccttcatatataaatgttggagaaatctcctgtttctaatgaatagtgaaagaatctatccttatctgtgctctgaaagaaactttcatctgagactccctgaaaagatggctcagcctaacaccaacgctgactaccagactgggggtgctggcaaaatggcaaactgacagtgccaagggctttgtctgtgtcctgcttgatgaggtcagaaccttgttcccgtggaagacctactatgtcatacagctctgctgcattaacagccagtctgaaagtaaatactttgctttagacactgtttttaactgcttaatgagcatactgacttcccaccctaccccccaattagctgcatatcaatcagtcaattagcagatagacagctcagccaaggaacagtgaaggctggtgttgcaactgattgttaaatctgtcttgaatttgctattggaaaatgagagaagtttagggcaaatactgctccctgtacccctgactgaaatcttctagacaaaataattgctatcaaatattctgatacaggaattcttgaaactgcctggttactttactagaaagggaagcagccactaactgcaaaagactacctctgttgtaccagatgcacaagaagagattttcaccattgcagagctatttatacacagccaacttctgtcctcagttcacatatacacacaactcccattgatatcagtggaagctgcggacatgtggctgagaacagaatttggcccactgagctgcaaggcttggcattcttttgctcactatgacaacttcagaactggatctcttagcacatgtgcttttagaagaagagttcttgatttattttcttttttttccctcccctctttatcttggccttgaaaaacaaaatggaaacttgagaaactactggcagcaatgggtttttcttgcatagaatcaactgtatggcggacttggagaaacagagaccatacaagtttttggattcaaaaacttgacaaaatagttttctgtaagtgtgctgccgttcccaggatgccgactaacagcttggcttcacagtcgtccttgaaataaaagcaaaagatgccatgaaacaacttttacacacgtaaaattattaagtccaatatttaatttacagatgacatattccagagaatatttgaaacctgtcattaatatgtacttttattcttcttataggaattgctctttctctagtttaagtgattttagtggggctgtcagcaagactcctgcctccctgtaagtgtacatgtcaggctaggcaatcagtgtatccagtcctcttgaaaacaaaaggcctattaaccaaggagagacaaccagcatatgatatttcaaagattatatggaacagggaaacagactctccttccgaggtcaggagattaaaggatacaaagtcttttagctttgggggccagttttgtaccacttagagaaaaactgcaggtaatgaagccaacagggaggaaagtaaagaaggtagaggagaaaacatttttataatatttaaatccctggatctagccatgccttactgaattttcccactatgaacaaaaaattaatccctttattcttaaactggttggagttgaatctctaataactggtaacctatagggatttaacaaaaaaacattgctccttcattcactctagagattttctctgccaaaatgtatttttttattgcgtgcaaacactcagatttcaccatctttgtatatactgaaactttcctaaataaataacctcaggaaaaacatgtgatttgcaataactgtggatgctcttcacaccaagaagataggcaggaagattatactagacaatgcaaacacataatgtctccatgtctctgctctgttgggaaagaggaagccagtggaggaccctctttgtggatgcactttgaggaagcacctcattatcttgactcttggctgttgcccagtgtggtgccctgatggagtctgcgcccagcatgtagctctggtaatggatccagtgacaggcagactgtgttacaaggtgcattacacttgaccagccatcattacatcggttctgcccaaattatttgattgacatttttagagaaagtcaggaactgttcataattggtagccaggaaggcactattttcaaataagtgaataccaagaatgaaagtgtaaaggaagagacttaaagaaatgggaaggttttcagccaggcgtggtggctcaagcctgtaaccccagtactttgggaggccaaggtgggcggatcacgaggtcaggagatctagaccatcttggctaacacggtgaaaccccatctctactaaaaaatacaaagaattagccgggtgtggtggcaggcgcctgtagtcccagctactcaggaggctgaggcaggagaatggtgtgaactcgggaggcgagcttgcagtgagccgggatcgcaccactgcactccagcctgggcgacagagcaagactctgtctcaaaaaaaaaaaaaaaaaagaaagaaagaaagaaatgggaaagttctagggaaatgggtcttctgccattgtgaaatttggatttcacaatttaggatgtgtgggccatcctaaaattaggagaatgtgattcagccttgatacacacgaattggaagaatagcttacataaacagcctttagttacatctatttggcatagcaatgaatctatgcaaaaccttaacagtttattgtacagtacattcccatcaattacccagaaaatacatgtcttatatgtcaatatatcatgcagtagattcccattaatcatccggaaaatatgtcttaggaataagttatctactgcctgaggaatttaatttaattgttgaagaaattgccttcagcagggactgatttcttgcatcattaccagtgagtgtttcctcacatgtaataactgattttccagacattcaccttataactcccatttatgtgcaggttacaatatccattagacatagaagtcccccttaccacacatgaaaacacatacacccacctacccactcatctaccccaccctacccaccacacacacgtaagaggacttcaaaaagttcaaggacaaatggaattaaagataaaaattaaaaagatgaacttgtttttcaacatatcatcaagttcaagacacttattataaattatgataccagccatttagtctgtccctaaagaactgaggctcctaagaatttaaccatgttgatgcagtttttttttttacattattaagtgaggaacaatggataccctttacagatttttttaacattcagaaacaaaaagaagtcagaatgagccaaatcaggacgataagttggatgtctaacgaattcccactgatattctcacaatattgcccttgtttgatgagaggcatgagcagaagcattgttgtggtggagaagcattgtcatgatgaagctttcctgggcatttttcctcaaaggctttggttaactctcaaaacactcataataggcagatgctattgttctttggcyatctggtatgtcaacaagcaacatgctctgagcattccaaaaaattgttgccatgaccattgcctttgactagtccacttttgctttgattgtaccatttccacctcttggtagccattactttgattctgctttgttttcaggatcatactagtaaagccatgtttcatctccggttacaattcttcaaaggaatgcttcagggtcttcatcccactcgtttccataaaagctatgctcttgtctgcagctgatctgggctcayyggttttggcatccatcaagtggaaagtttgttcaatttttttcagtcagagctgtgtaagctgaacaaactaagatgtctatggtgttggctattgtttgtgctgttaactgttggtcctcctcaaatagggcactaaatttttttttaaaaaagggcattaacaaggttaaatttttctacacaaattgatgtagatggtctgccacaatgggctgcatcttaaacattgtctcattccttcttaaaatgagtcatccatttgtaaactgatttctttgtggcattgtccccataaactttttataaagcatcartgatttcaccgttcttccactgaagcttcaccataaatgtgatgtttgttcttgccttaattttagcagaattcatgttgctttcacagggggtcttttcaaatggatgccttatctttcttagtgcttcaaactagattgtatttatacacattataataagttagtaagagtttattttggtgcaaaaagtttttgaaatccatctatagttttctcataaatgcattttccatgaacttttcaaagacctcttttccatcataaatctaaaaaatgttaagatttaagtagcttcactcatctaagagaatcactaagcatttatttgactgcttgtttttcttctactttaaggtgtgcatttgtttcttactgcatgtaataaaaggagccatataaaaaaggtttgttatatggtataataagcaccgtatatacatggtctttctggatactcacaacagccttgtgagacaaagacaaccccgttttacaaatgacaaaaacaaggcttagggctatgaaataaccaagcaaatgagtttgattccaaagctcattctaataaccactaagtaaatgtcagtgcactgttgtatatttttaccgtattttataaaaggtccctaaagacccaaatcctctgtgcatttagttacaagcaccattctgcatttccccccaatacattttcccctggtttatacctatcttctttgttctattatttttgaaattttgagtagtaaaggaatttgggagagggaggatgaagagagagagaaaggaagacagaatcacaccrattaagatgaatttagaaagtaagaccactacggctcacattggtggcatttccctatgtgtctttgcaatgctcttatctgacacaggtctcttaaaggttgggttgaatatctgttcctcagttattgctcttttactccccaaaatcttcccctacaaaggactaaaaatagtgatcagaaatgacmtttccctccttagtcccaggtttgtttgggatttcatgtaataaactagagcatgggtgtcctcttccactgattgccatgttcatttcatggccttagtcaggtgccttggctgcaaattttccctctctacactgaaaaacccagttttgctgggcaattttagttcccactatgaagaaaacccttccagcatgtaaatgcaatgcttggtgaggcctttcctgaaaagcagtgttggccttcacacacaagatgagacatgtggagattaactttaatatctaatctattgcagaggtgaaactaaattctatttctttctcctcatctgaaatgaaaaggaaatgcttgaaattttgccccccaaaatagagcactttaatcaaaccattttaatgtgatattcctgtgtcttcattaagtttccagacagttttaatgtttattgaactaaattgatagggttaaacatctttgtaagtataaactaaagtttttatggctatttctattattgtgtaaaagaaaaataacaaaaaagtatctattcgtttgaggaggtagctggtatttgctagcaaaggagaacagccatataattaactgtgtcaaaatgttttctttgttcacagttaatctaactgcagctgctaggaggcagaatgcataaatatgactgtgtacttttaattacagaaaatgacaggcgtaagttgtgactggagtgttgcctgagattgttgtgggcaaaaatgttgctcagagactcattgaattaataagtagccttttattttttggtgtccaaattgtatagatgttactagcaactaaaataaaattaaatttcagaattttaatcagccaaagaaaatttaaatataatcctgcaacatatttagagaaatcatggcacataataaccatttgatattgaacattatatacaataatacttcatacatgtgatttttgtcttggagcaagaaatgctctacataagtgaattttctagagatacctttaagaattaaattatttctcccaattttcctctccattctgtgcaaagaagtcactcccaattctgatttttttccctagatgctctaataataatgaagacaaaatatctcatatttgctgatttttctgttttgataacacatagtaatgcctataaatggaggggtgggtagctctgagtcctggggttcattcccctctaggtgttgatacttatgacatagtatgaaagagaaatggagcagcacttcattatttgggacattgttctcttcttcttccccttttctcttctacctttaatggctgaatagtatagcagaatgttcattgggctttccatcaaacatattttatattcattgtaactctgagcagagaacttaacctttctgaaaatcagttcatttctttatatggatgaaataggatcatcaatgtttaaattttaaatatagtgattgctcagaaatgttattccttttctttttatttttctcctctataactattttttaatcacctttttattatacatcttttctcctttctgtgctatggtagacaggtagggggtgtggtattggctagggaggcttaaggggtcacggtcaatgctgtagataattgctgttttcagctgccttgttgccttcattctattgtctatccctgcacgcagccactgtgggggtggctgtcaccttggtgacagcagttttgtgccatgcatgtggtgtgaacactggcttagagcagggtataaacaggtcctgctgcttcaagtaattcggtataagcagacagactattgcctttgttctcttagcagctctgctgctgaaatacactaataatagaacatgttagttgaaattatgcctctccatctctaattactgcatgccaaagtattctgactgctactgtcatttcccagcaactgatggctgcaggtgattgtttcagattgtgctcaagggacttcttccactcattctactcattctccctttgccccactacgtcatgtgttcaataacttgactgattcatttcagtatgctgaatggtttgaatgaaatagaaatgaactttaagaaaatattttcaaatcagcagatgttcattgtgggttttctctgtgtaaaggaaagtggaacagtcatagaaattgtttagttatatccagaatctacaatgaactcaaacaaatttacaagaaaaaaacaaacaaccccatcaaaaagtgggcaaaggacatgaacagacacttctcaaaagaagacatttatgcagccaaaaaacacatgaaaaaatgctcaccatcactggccatcagagaaatgcaaatcaaaaccacagtgagataccatctcacaccacttagaatggcaatcattaaaaagtcaggaaacaacaggtgctggagaggatgtggagaaataggaacacttttacactgttggtgggactgtaaactagttcaaccattgtggaagtcagtgtggtgattcctcagggatctagaactagaaataccatttgacccagccatcccattactgggtatatacccaaaggactataaatcatgctgctataaagacacatgcacacgtatgtttattgcgtcactattcacaatagcaaagacttggaaccaacccaaatgtccaacaatgatagactggattaagaaaatgtggcacatatacaccatggaatactatgctggcataaaaaatgatgagttcatttcctttgtagggacatggatgaaattggaaatcatcattctcagtaaactatcgcaaggacaaaaaaccaaacactctcatgttctcataggtgggaattgaccaatgagaacacatggacacaggaaggagaacatcacactctggggcctgtcatggggtggggggaggggggagggatagcattaggagatatacctaatgctaaatgacgagttaatgggtgcagcacaccagcatggcacatgtatacatatgtaactaacctgcacattgtgcacatgtaccctaaaacttaaagtatgataataataataaaaaagatgatctatgcattcctgagcctaattttccggattttgatgaagacaactattcaattccatccctactcctacctaactcccccacgtctctatgcatttcaggcagaccttcaaccacgacctgatattcttcctgctgcagacagccagctctgttcagtcaggctttggatcctggagactctctaatctagtttctaagttttacagatgaagaaattctgtgttacatgaagtgtccaagatctcacagtagcttaagcaaagatagaagacaaacccagcattcccaactgttgatattgtatgctctgtgcctcacttcattgtatgttttacctgttatttaatgtaacagatgttgctgataaaatgtgaacagaagttgtcagtggcaggtacaaatcccaggccaacatcgaaagtttgtcactgtcagaacttctgttcagttttagttacatctgctaaggattctaagcacagtgtacatgaaccttccaaaagatccttggcatttttacatcacttttgtttcctcctgctttttatattttatggaatgagtccaaaatgatcaaggcatgtacagtttacataattgtgcactcaaacttgaattttacatgcatccagaatttggtctaattctgtaaaataaaacctcagttggaactgggctatgctgaaaagcaagtttgatataagtgacattcaagatcaccttgtattttccagatgatcagacctgctgtttctaaaagagtacctcactttgtagaccactaaatgcaaattgtattttaaactatagatttgggggaggaggggtaattaagagttatagtaatattgattcttacccatgtatgagtacagatgatatccccatttattcagacattgttttatacctttcattattgttttattgattttaatgcccttattagattcattttcagatattataaaggtttgtttactcttgtgcattggtctacttttctttctctttccttttttttttttttttttttgagatggagtctcactctgtcggcagggctggagtgcagtggcgtgatctcctgggatcaagtgattctcctaccttggcctcccaagtagctggaactacaggcacccaccaccacgcctagctaattttatttatttatttatttagtatttttagtagagatggagtttcaccatattggccaggctggtcttgaacaaactcttgtgtgcggatcaagtgatccacctgcctgggcctcccaaagtgctggaattacaggcaagagccaccgcaccaggccattggatctatttttctgtcatgtttttcaagtttgtttttgttgacttactaaagaaaaattggttttttaatgttaattatgtgttcagcatctctctaggactttcttctcagttcatgtagtttgtctttctatctttctaatcttatcttgaacagcccactcagctttgttccaacaacagggaccttcagatagttcctaaaattccccaagcattttcctcacccagagcctttgcttttcctatgtctcaagtgttcttcagcccaagtggttagctctattttctttatctttcaagccaccatttaaaaatcaacttatcgcagagattattcctaattataccatcaaatgtgggcccttccctctattgtgcttttcaaattccccagcatcacgtttttacccttcttaaaatgtatcgcaagctggaattgttttacttacttgcatttttacattaaaatatgagtttcatcaggaaaggagcttatcagtgtggctcactattatcttcttagcacctaaagctgtgtctgacaaattgtaggtgttcagaaaatataagaacacaagaagagtgacctgagactaatgatctaacatctctgattataagtagaaaatacattttcaaagcatatagtgatacactctgtctccgctgtaaaagaataaaaataaaatataatcataatgaatatccatgacaataaaacatagtgaaattttctggtctaagtcctgtccccaagtgccatgcaggaacaacaacaaaaagccaagaataatgcatagggactcagcacccaagtacggtttgagccacctgaatttaaacagtctgtgattgatttagtatctctctttctctctctctctctatatatatatgtgtgtgtgtatatatatacatatagagatactaaatcaaatatacaaattttctcttatatttatatgtgtttaaacatatacctatatgtttataagttaaaacacacacactatgtgtgtgtatatgtgtgtatatatacgtgtgtatatatgtgtgtatatgtgtgtatatatacgtgtgtatatatgtgtgtgtatatatatacgtgtgtatatatgtgtgtgtatatatgtgtgtatatacacacatacacatgtgtatatacacacacatatatacacacatgtatatacacacacatatatacacacgtgtatatacacacacatatatacacacgtatatatacacacacatagtgtgtgtgtgttttaacttataaacatataggtatatgtttaaacatatacaaatataagagaaaatttgtatatattgaaacatataccagtataagagaaattatgataaatatttaataaatagctcaagaatcacttgctgcagaaattcagaacatgggtcgggcgtggtggctcacgtctgtaatcccagcactttgggaggccaaggcaggcagatcacgaggttaggagatcaagaccagcctggccagcatggtgaaaacccatctttactaaaaatacaacaaaaattagcctggcgtagtggctcatgcctgtaatctcaactactcgggaagctgagacaggagaatcgcttgaacctgggaggcgaaggttgcagtgagccgagatttcactactgcactccagcctgggcgacagagtgagactcagtctcaaaaaaaaaaaaaaaaaaaagaaagaaaaagaaaaaacaaagaaattcagaacatgtatccaacacctagtgtatcaatagaagaatagggcttatttgaccaagggtcattaacagtgttctgttaatgaaccttgaattggccacagaaaacaatatcctgatctgtcaaataaatgttaccaagtgcttactacattcagcagtgcgtttagtttgcggaagagcagaatgactaaatgaatgaatgaattttaaaattgagttagttatgtggacgtttggcaaatgtacaaaaagaatcagcaaagttttattacaatgcaaatgttatgctgcattttaatttctatttagcctctaatatgcaacattaaatcaaactattgtgtacaagaaccttaaagttcatttaatgtgattttaattcatgttataaattaaattatttgcartggaaatggagaaatgtcttatatcttagtttagacttgtcagctttccaggctaattttgtgcacagtaatactaactgtagacagacactgtacatgaactacagtgtccaaatcatagatcggacctacaataaatttctgtgtggaggagaataaattctcctccttctctccattctcatatcaaactcctccggtattgcattgctggttagcacaaactaacccataaacagcatttaaggggatgttgccattgctgaagcacatactgctattgaatcccattcttcaagcttctcatgcatcactgaaagtcattcaggactctggattcaccaggaactataaaagccaccagcaactactgagaaggcaatgcaattgaagtgtaactctggttggaaartaagtagggaattgggtgttgagtccctgcgtgttattcctggccaaatacatcagagctacatgtcaggttttgtccaaaagtgttgtatttgctttgattttcagaagttcaatataattccattattacaagttcatctatttcttaatgttttaaatacattttatctaagtattgttttgtattggatttactctgaatatgtcaggtctttatagagaaaacagtaaataggaaatatgatacaatatttacagaaaatattctccagttaatgtatcttattattatatgctcttccttatatggtagagtttatgaagttattgagttcattagaaagtgaattaagaacatgaaataggtccagtaaaatatgaacccacacatcaaaaaaaaagatctaatctccaagtggcttgaagtgtagtgtaaatccagtaaagctccaaaataaataaaataaaataaaacgatattatagtatgcatattcaaatgtattaataaaatygtgtgaaacctttttttaaagaaatgtaaatctaagttaagtgttcttgctgttacagattaatagatccacaactttctaatttcaaatttgaaaagctaaacttgtgcaccaaaatattttcagctgaaatatttttaaacattatattttttctattattacttgagctttttaaacttagtaattyaaactaatcttggaacacttgcaaaatgtgatggaaatgaagaagaaataagctgtaaattcaagatggctgaagtttaatttctgtgccgaccttgggtatgtctagggaggaaaattggcactctcttaacaaaacaaaccagagcttagtttctacatagaacaaggtttgaaatgaatatggaatgaaggtaaatatttagaagattaattctttgagcttcctcaataccttagttttgcaagactttgaaaccatcttctccagggacaaaagaaagtaattacctctcctccacatgacgtttaatcatgctctatttttcgaagaacagctgtgmaacactggctgggctacaaattaaacatacctccttcaacttgcttagatttaaaagataatgaatatgttgggtgacagaatctgaattcaaaaagactttaataggccagagctataagctgaaaacaagatgaaagtaatcaaggataaatgtaaggtcctatacttgagtccaagaaaccaagtgagtaaatacagggtggggaagataggacttaatggcaacagactgaattaagcaccagagaatttagaagctatatttgataagaagctaaatatgagttggtggtttcatctaactaaaaaaaaaaatagaatgtggcacatggtacataagtaaaagcattcatcattgaagacctaacctagtttgatacaacataatatgaattcgagggacttacagctctttgcaaaaaaacgctatcactgttattttaatatttgttcaagcagagatcaaaggatctacgctgacataatcttccttttactagttgtactaaaactccaacagtttctgttattatagaatttgtaaaagcttagatactagctggcatcagaatattatgtatattaaaaattagcatatataccacacatgaataagtgaaacaagatgtagcttaatgaaattatgttgtggaactatccatttaacttatgtcacatttgttaaatctagattactttcataattctgacaaagattaacaactgaccattgtgtaatagagaaagaaaataggacctatgtaaaaatcacagagggtctaggaatatgatgtataaaatattttgaggcttcagtctaggaatatgatgtacgagacattttgaggcttcagttcaaagcataaagagtgaaacatgatacatttaccagaaaataaactaaacttctaaacacatgtaaaggagagaggtcattattatctttgtgaatattcattattacagaattggtaaatttcccaggttttcttggcttctctctctacaaataaatcactgtagtaaaaactctcacaggactgtcaggtgggttttctggaaatatttactgtaattgatttttgtggtttcctaaatgctgtaatccaaaacctcatttatcaactttctgtctgctttattgtaattgcagagttttctattcctatatcatgacaggtcagagcagcgctgtgacaagcagcctctgtattagtaaagatgtgcattccacacaccagcccagcaatccagattattgactgtaattaaactcacaggggagttaaacttgtttgacaagaaagggggtgggatgatttgcaggatttaagtcatagcaacagtgacacatgcctgccccaaaactttctctgaattttgcagggcctgtacacatttagaaaagatcaaataattttgttctgcaagagagtagtacatatttataaagcactgaatcccggaatcactggtcccattaattgaacaacacaagcatgcttcttgaagaaattcatataccaaattttgttattctaatatcagttcattacagtcagacttctggcctgggtccagaaacaatgccatttttaatgggttgattgctaaatctcttgctttctttagtttgactcattctttatcgtttcttcttctgattttgactcatttttcttttcacaattaggctttgtcccccttctgcatcacttctccagctttgaccatgttcttctaatttttgccaagaatgcggaatctaattttgatgacactgattttgctatgctggacatatcccctgaccattcagtggaggtccttaggaaccctacattctgggtgtctggatctcttcccacttcttccacctaccttcctgcctctttctcccatatttggccagtccacatgatcgtccaatgtatgtaagtgagactcaaacaaaagcatagaaaactttgttttcaaaaagtaaaaaccattcactcttttgaatattactgtttgaaatgtgtttaggtcctttgggggaatggctatatatgtttatatatatatatatctccacagtagtagcaaagaaaatcaataaagggtatattttatgactcccttttattacaggataagaccaagaaacattagaatcatttaaacctacaacacagagattgaaatacttgttttatgtaggcccagtctctattgtctgaatttttcattagctatagaaactttactggatattggatatggatatagataatcctctctggatatataaaacatctttttatttatctgacataatgtatttaaaaactagttcttctttcttcattctgtctacaaggaaaatccttttcactccccattagttttcttgcaagttcatgcttgtgataaaagaaaggcagaatcagagtctaaagatgggtcagtgaacacccatccctgcactaaagggctatgaagggcagtgcttgctgttattgggtaggcaatataaaaaatatgtaaggaataatattaattctgaatcctggcccattagagattggagcaatcattgctagcaaacatattttctgccttcaagtaatttatagctaattgacagagtgtagaatatcacaattaggtacatcagaaaaatgactttagtaacttggcaggaccaaaaccagccaggtgcaatataacacaagataataatgagtaggtcatgctcatcttcaaagcagaagtcacagctcctaggcgacaaatatcacaaaaaaacttattcatgtttttctgttttgttccttgtgatatttccatatggtatccctgaagataagttgtatctaattagagtgtagaaatactttcggttgctagttgttagcctaatctttactatagaagctgttgtttgtctttttctgaacttttacaatgacatttaatacttaagttaccagtggtatatggtgccctagctgagtgagggggggaaaattgtaatggcagattctaagttaggattttgattcataatgtttaaactttgacactttttaataatgaattctaaatttaaagttttgattgcttgwtgaaaagcatagttcaaacttgcaaattccatttttcttaatgcataccaacatttagtaaaatacctgtaggaatttcaatgaagattttagttagacaaaagctgtaaataaatattgttaaaaagaaatgggtagtatagttgagataatatctaatccatattaatacttatttttgagtttgaggtgtacttgtttttattaatacttagagaaaaaataattgtttgttggctgaaatgtttcatcttcacctgttggaatgtgtgtttgtgtgtaggttctgtaaataactatgcagtgaccaataaactgatgaaggagatggtataaacaaataaatgtcaaatctacatcaggtataagactacatgctgaattcaggtagtgtcatttgactattttaattaatcaattaactatttatttcaagtcaaccaaggattttgcaattaaaaaatacaggtactcaagggaaaaaaatgaaaggtcactcattagtaacaaaatttaatgaaggagacaataaaataactctggaacacaaacaagataaacactattgcagtaaacagaaggaagttatgatcatttattaaagtatagtacaatgtcatcacagctacagttaatacatatttttgagcatctactttagacaaagcaatgttccaagctcctgaaagatgaaaatacatacaatctttagtctcatccttcaaagtaagaaaatttataggcaaacgtttctgaagcaagaatcaaatagcagtgcaagataataagaagcactacaaaaaggtacaaacaaatccccagtctaggatgactgagggaacccttacataaaggaargagtttaaaaattggcatgagcctgatgaatggaaaaaagagggaagaagatttcagaacaatgtgagcaaaatttcagatgcagcaaaatagaatcttgagaagaataaataaagcaaattagctagtagagtcatggactttagctaaggctaaagtgggaccacagtgagggtaatatctatttttttcagactcctaaattaatatcttcaacctgagcttcccatggaactccagattcacatatacaactgtatacttatgttctccacttaaatgtctaatagatgtctcaaatgtaacagacctgaaactgggcttctcaaattctcttgccaagcctgttctccagtagtcttccccatctcagttggtaacaactccaccctcccagttgatcaggtcaaaaagtgtgaatcatctttgacatctctctttctgtcacaccccacaatgcccaccccaaaggaaatgaagtggacagactgctccatggacctgacgggctgttgttgggataaccaccatgctcgtaactttcatcctgcaccaagcctcacctggagtgaagggagtcatagctctactctgccctgggcaatagtgccttctcttcatgcctttctgggtctcagagtgactaaagaggccataaagactgcttactttactcatttaatcaattcatggatcaatcatctaaacatttctcaataaaaccgtttagtagcttcgcttcccattcaggggaaatgtcactacaataagctgcaaaactcgccagggtctggactcctccgtgttctcctacttaacacctggttcactccattcctgccaagcctttagctgttcccccaacatgccaggcttgctctggcccatggctttgccctggctcttccctctatctggcattcccatcctcaccaccaccacaccatgctccatattgtttccttaccatatatggcaattgacgcaaattcaatattaggaagccttgtctagccactttatataaaggtgtaattaaaccatctccatatcacctgcagcaacttctagcaccattcctgtatttattttccttgttagcacttttgccactgaatcactgcataattgattgattgattgatttttattgattgtcttcctttctacaatgtaggcaagggttttttcctgttcccagaatggctacatccacagcagttagaacattcacagtcccaagtagaactcaaaaaatggagttgaatgaatgttgcatttgaaaggaatgaatccatgttaagaatatagataaatatgaagtttattcatgagctctggatttatcctctagataaatttctccaaactgtttattctctgcccatcatattygtttcttttaaaatatatctccttaattgttatattagatttcacattgagaatgttatatcacataattcctgtttacggctgaaactttaattgttggaagtgcttaagtggacctgttatatttttaagatgacatagagggttgtcccttagttgaaaataaaggatgcttgctgcaggggctggaaagcatagagataacaacttctcattctatgagcaactcccgtgggggctgtgaaatcttagggcagagaaccactgaggtggcaaatcctgctctcactgaggaagcctgttagatggatggtgcttagtttgccaatgtgctgcttcattaattctctaaccatcgtgagggtgtgagggagactgctgaatgttttgaaaggagttttaattggaccttcagtcgatacagttttctaaaactaaaatttaaaaaaaacgtccccagtggatagggtcagtgacacataatctggaacaagaaggaacgatttctttgagttagtgtgttttagggaaacataccctatgattaaaagcaattctaaacttaaaaggtgaagcaggaaaggaaagcagccatttttttctcttgaccttagggtcttcaaccagtttctcattcacctgctcttacagatgcatcaacaatcaaaggtacagagctcagtctgaacctagcaggtaggatgcgaaaccttctcagtcatatcgtcatggtttgtttaagctaaacaatccatccaattttactttctttgtaagtctgcctaaattcaaaataattgatgggccattaattcaaatatgcaattggaattactagattctcaatttgatacctaacgtaaactacaagtttgtcattgcattaactcatgtctctttcctcatatgctcaagctttttatggaactaaaaatgattttcagcctctaaattctcccttcatatatattgattatatatcctagaatacggaaaattcttaaaaatgaaaactgaggcatatcaatcaacaacaaaaaacgtatttctggctgggcatggtggctcatgcctgtaattccaacactttgagaggccaaggagggtggatcacctgaggtcaggagtgcaagaccagcctaaccaacaaagtgaaaccccatctctactacaaatacaaaacttagccaggcgtggtggcaggcacctgtagtcccagctactcaggaggctgagacaggagaattgcttgaacccgggaagtggaggttgcagtgagmcgagatcgccccactccactccagcctgggcaacagagcaagactccatctcaaaaaaaattttaaaaatgtgtttcctcctcaaggaagtgtatgttatctcaattatatgacacatattttaacagaaggtttttgagtaaaattcttgcagacagtctttgtatgaactctagatattcacagaaactagtacgtgcctttagaatttttaaagaaaaaattataatgctttcctccctgttgctctgcattcttaaaatcccagcctcctttatgtctgaattaatcagtgaaatataccaaaaaaaggtagtaaatacagctgttaataccaayttcacatctgtcataaccaattcagtgaaaacaaatctgtaacccccaaataaattccaaagtgattaaagtcataattgcaaattaaaactgtaaaataattaaaaggaactatgtgtgaatattaatttaattatagcatatagaaaacttctcaaagcataagtctaaaggcatagaattttaatctcctgtatgtcaaatttcattataaatatctaggaaggctaaaacaattcaggcaaggggacgatggtaatatatgtatgagaggtgtcataatttttgtattgttgatattcttaatccataaaacatttttgcaaatcaatagagaagaggaatatttcaataaaaaaacacaaacaatttgttaaaaatcaaaagccttgaaaatatgcatatatttaatctaataattccactaaggaatctaacctgaagaactaatcaaagataatacaaagcttttgttaaaagcaaatgcaattgtacctatgaaaaaaagttcattgaaacactacttaggatatcaaaagactaaaacagcttaaatttccaacaatcagagattgtaagttatggcatattcatactttgcaaagcagaacagtaaccctgcataaaatatccaacaacatggataatgtacataatgtattgctaaacaaaaaaaatggattatgtaatactataatgcaagttataatctggatcttcagcaaactattcagatcagctttttctagttagtgagttaatgattttccaagttttccacaataagcaagtattgtatttacaattagaaaagatgatatcttgtaaaacttgtagtactttataaccagcaaatattcttctaatgttaaataaagaacataacctcaagctcacttttttttttttttttagaccgagtctcgctctgtcgcccaggctggagtgcagtggtgcaatctcggctcattgcaacctctgcttcctgggttcaagcaattctctgcttcagcctcctgagtaactgagattacaggcacccgccaccacgccaggctaatattttgtatttttagtagcaacggggtttcactatcttggccaggttggtcttgaactcctgacctcaggtgatccacctgcctcggcctcccaaaatgctgggattacaggcatgagccaccacacccagcaagctcacattgttattttaagcactgattacaataagatgatcagccctacccattcactaaggctgacataatattgtatgtgtgtgtgtgtttgtgattttattacgtgtatatacaatcttttttatttcttattaatataattaggctttgttccccacccaaatctcatcttgaattgtaatccccataatccccatgtgttaagagagagaccaggtggaggtaattgaatcatgggggtggtttcccccatgctgttctgacagtgaatgagttctcatgaaatctgatggttttataaggggctcttcccccttcactcggcacttctcctcctggccgccttgtgaagaaggtgccttatttccacttcaccttctgctgtgatcgtaagtttcctgaggcctctccagtcatgctgaactgtgagtcaactaaacctctttcctatataaattgcccagtctcaggcagttatttctagcagtgtaaaaccaaactaatacacttatattttgcaaattgaaattgtctttgaaggcaattttactttgcaaaattctttaaattgtgaacttctctaaaagaaaatgtgggtcaagaattcttatatgtgtcaagcgtttgtggcatattagtgattgtatatacccctaatgaatcatttatataccctgaaaatattttctgccctcttagcatgtaggggtgcagttcaaaacttgagatatttgattaccatgaatcttggtgcctgaggagaataagctagaaagagctttcctctttactgtctatagcaggaaccacttatatggtatctctctctaattccataattcctttcatcaaaaagatccctaaagtccattatgaagctaattaggagactcacttattttcaaaacccagtccctcttgtttgcccacagctaatatgtggcagcgaaaatgcaatttgatagtttcttgtttcagaaaggagtgaaagaataacttctctaattaaaaccactatgattttgtgggattttttctttaagtgggaggacagtgtaattacacagattggaatgcagccaaaacagtaaagtaaagttaactgcctgcaagtgaaataccacgcaagacattgcctatattagtaaattgttgtgggtggagtggaggtacatgaggatacacaggacactctctattggcctgtgaattgaatctaccactaaaaataagctaaataattattattatgaaatgtgataatcatactcatttttcccctatagtagactgagaataaatagactatcttagtcagtgtccataatttatgtaggcaatgctgcagaggatattattttgtgctggatttggactaaaactggtgtaggcaggtggaccatctatttttgtcagttgattaattggaagttggttctgagtcagtcaacggcatgactgtcacaagggcaaattggagtgtaagtttataggacaggcagcaattagtgtttccagatgttttacatggaatcaagtgaaaatacatggaaaaattaaagtagaagtaattacagtaccgatgagatgctgttaccatatttagagccataactaaaatgctaggtaaagtggtataggggctttacagaaacaaacataaatatgagatcaccaagttgattgtaggctttgctgctctgtaccattaatgctagcatgatggtgacagcaaattgtcttgtgagcagcatactataggacaggaaaacaaagcaatttgggtgctaagattggcatcataactgaaggccctgagaacaaatcttcgtcagttgttttatggagtttcatactgaaagattttttgaagaagcagatcctaggtgtggtggaratggagagatttcttaagttttcaraagtctatatgaatctattattaatttcaccagtactttttcatctttcctccccacccactctgctgtttcttgaatgtaagatatcatcaagctattccagttttttatggacggaagtgtttaactggcaaaagctgaggaaacaggaaagctgaaggaatatattttgagtagcatttattcaaaatataattattaaacacctactatgtgcaaatcattttatataacatagaaattgacaatgaacactcaataaatattgacttcatccttcttgtttactagcaaggatacattttctcagatacaaagatggtagaatatataagaacaaagattatcaaaaaatgtaatacaaaattctaagacaggaattcataacctgtgttccagaggcttgtttgggatttgggcctatgaccttattttaaaatgggtcattttgtactcacaaatgtatattttgcgtggtatgggtctctatcttggaggtaagttcatcatattttttcaagactcggtcacctcaaaaattcaaagaacaattggtttaagaaaaggaatgaacatgcctaataagtagagagcatgatgattagtacagacatttgctaacaacggctttgaaaatgtttaaacataacatatttattacctagttttagaatggcacagaaaaatttcaaggcaagagtaatatccataggaagcacttaacttctctaaaacggaaactgggtcactgaaatactgggaaggaaagaaggaaggtaaaaataacagttaagattcagtcaaggggcttgaaacttctgagacttcagagtgaggatttccataaatccacttcttcatgaaaacactgaaaaaattttcaaattaactttttcagaactctgaaaattagccaaatacatgtaacaatttgaggagtgttttatttattaaaaaaactgctgaacttgagtaagaacaagaaagtttatggctttttaacttgaccttaaacccttgcccctctccccagttttgagtagccttaaaaaacaacagtcttggagcactggagggggcagtccaattttggaactcctcaaatagtagcatccccagagtagcaccactatttaatctgtcttgaagctctctggaaaagctgtattcacagggcattgtcactatttgacctgattcagaaaccaaaagccctatctgcagggcattgttgaaagcaattacaacagcaattgtttaacatcacagatgacacagtaccagttggggtgaacaagagcctgaacaaaaacataaaaggaagacctgccaatgagatatccatagaggtctttgtaaagccctgacatattgtgagggatttagaagccacatgtataagtagggctgtgtgcatgctgaagaaagaccaaagagtgccccagtccctcatctctgactgatgttgagcccctgtaccaggaggaagtgaaggcaaaggcagaatttaaaacttcctgagcattrctgaagttccccaacacacacaaagcctcttggcaaagggttgacttactggttcacagtattctaaaaaatatctgagcaatcactagctgaccacttagctaatcagagacttcagttgttgcccaatagagtaartacagactttacagaattagccctagaaaatctctaaacaacaaacagcaacaataacaaaaatcaacaacaaaccctggggaaaacatctgactttcagatttgccacattttatgatttgcaatgtccaatttttaagagaaaaattgtggtgcatacacaggggaaaagaaattgtcaatagaaaatctgttacctgaggggacccagattttagacttactagacagactttaattaagctattataaatgtgtttaaagaactaacaggaatccttttcaaagaattaaaggacagtatgacaataattcacccaataaagattatcagtaaagaaacagaaattaggtcagttgctgtgactcacgcctgtaatcccagcactctgggaggccaaggtgggtggatcacgaggtcagcagtttgagaccagcctggccaagatggtgaaaccccatctttactaaaaatacaaaaattagccaggcacggtggtgggtgcctgtaatcccagctacttgggaagctgaggtaggagaatcacttgaacctgggaggcagaggttgcaatgagctgagatcatgccactgcattccagcctgggcaacagagcaagactctgtcccccaccaaaaaaaaaaaaaaaaaaaggaaacagaaattattttaaaaacacaaacagatattctggagctttaaagcataataactaaaacagaatatttgagtttactcaacagcatatttgagttggcaaaagaaagatcaaaagaaagaaaggttagtgaactttaagacaggtcaaytgagattaccyagtcagaagaatagaaagaaaaatgtatgaagacaaatgaatacagtctcagggacctgtgggacaccatcaagcatatcaacatacacattatgtgagctccagaaatagaaaatggagtgaacagggcagaaaaaatatttgaagaaaatcatagccataaactccccaaatttgatgaaacacataagataaagtcaaggagacccacacctagtcagactgtcaaaagacaaaggaaaactgttgtaatcaacaagagagaaaaaagactcatcctgaaaaaaaatttaatgagattaatggctgatttctcatcagaaatcagggaggcaaaaatacagtggaactaacattcaatatgttgaaagaacaatactgtcaaccaagaattctatattcagcaaaactatctttcaaaaatgaaggagagattgagatattttcaggtaaacagaaactgagagaatttgttactagcaaatcttccctgcaagatttactaaagggagattttcaaactgaaatgaaaatacactagacagtagctcagattcacgtgatgaaatacagagcctccagaaagataagtatacagtagtcttagttcattcagaatgctataataaaaataccacaaactgggtggcttaaacaacaagtatttgtttctcacagttctggagtctgggaattccaagatcaaggtgccaacaggttcagcatctggtagggtcccacttactagtttatagacagctatcttcttgctgtgtccttacatgacagaatggggtcagagagttgtctagggttcttttaaataaaggcattaataccattaatgtgggctccactctcataacctaatcacctcccaaaagccccacaccctaattctatcacattgggggtatttcaatatataaatgttaagaagacacaaacatttagtccagtgtaataggtaaatagaaaaagtttaactgtaattttatgtaactcttttcttctttcatatgatttaaaagacagttgcagcaattgttaaactgtgttgatgggtttataatgtacaaagatgtaatttctatgaaaataataatacaaagagatggggagagagtagagctatactggagtaaagtctcagtatattattaacttagcgttaatatgaactagattattttaaattaagttgttaagtatagttccagagcaaccactaagaaaatagctaaaaaattatagtaaaagaaacaacaaaataattaaaacggtacactagaaaatatctactgaatacaaaagagagtagttttggaagcatatagaaacaaagacataaaaactgtagagaagagctactataatggcaaatgtaaatcccaccttaaactctctaataaaaaggcaaatgatgtcagaaaagattttaaaagtgattcaactctacactgtctacaagagacacattttagattcaaagaaataaataggttgaaagtagaaaagatgaaaaatacactatacaaacagtaaccaaaattaaaaactgtgagaattaaaggaaaaatataaataatttaaaaattatagttggagaattcagtatctcactatcaaaaatagatagaacacctaagcaaaaggtcaacaaggaactagaagacttgagcaacactacaccaaccagccttaaacatctataagatactccattcaatgacagcagaatacacatttttctcaggtagacacagactattttacaagatagacaatatgctaagtcattagacaagcctcagtaaacttaaaagaatttaaatcatacaaaatatgttctctgaccacaagaaaataaaatcggaaaccaataacagagggaaatttgtggaattcacaaatatgtgaaaattaaaaaacacacttctaaataaccaatgggtcaaaggataaataacaagtgaaattttaaaatactttgaaatgaatgaaaatgagaatgtaacatactaaaacttacaagatatagctaaaatagtgcttagagagaaatttacatctgtgaatgtctattattacaaaacaaagatcttaaaacaatagcctaatcttccaccttaagaacctagaaaaaggagagcaaactaaacctaaagcaagcaaaaagaaggaaattatttcaaaagttagagtaaatgtaaatgaaatggagaatwaaaaaaacagagaaaaatcaaagaaaccaaacttggtttttttgaaaagatcaacaaaatgtataaactgaagctagactgaccaagaaatagagcatactcagattactgaaatcaggaatgaaaaaggagacagccctattgtccttataaaagcaaggataagaaaatacactattatagtatatattcttaaaagaaaatacactattatattcttataagaaaatacactattaacaaccccataccaacaaagtggataacttagatgaaaccgataaatttctagaaaaacacaaaataccgaaggtaactaaacaataatggaaactgaatagacctatagcaagtaaaacaattaaattagtaatttaagatattccagtaattaaaaatttccaggcccaatggctttatgatgaattctaccaaacatttatgggagaaataaaaccagttctacacactttacacacacacttctgaaaaatagaagctaagagaacactttctaaatcattccatgaagccagtaataccataataccaaaaccaaataaagatactacaagagtaagaagctacagaaggggagaaaatatgcacaaatcatatatctgagaaagaatctgtatcttgaatatgtaaaagacttaataactcagtaacaaaaagacaaccgtagacaatggattttgatagacatttttcgaaagaagatataaattattaataagcaaataaaaagatactcaaaagcatttgtcagtggagaaatgcaaatcaaaattacaatgagatacaactttatacccactggggacagctatgataaagaaaaatagacaattaaaagccctggtaataaagtagagaatttagaaccctcatacattgctggtgagaaggtaaaatagtatggccacttcagaaaatagtctggcattatctctattcaaaagaaataaaatcatatgacccacacaaaaattgtacagaatattcacagcatatttttcaaaatggtcaaaatcgggaccaatcaaagatgaatggagaggaccaggtgcgctggctcatgcctgtaatcccagcactttggaggcagagatgagtggatcaccttaggtcaggagttcaagaccagccttgccaacatggtgaaacccctgtctctactaaaaatacaaaaaaaaaaaaaaaattacctgggcatgggggcgcacacctgtaattccagctgctagggaagctgaagcaggagaacggcttgaacacaggaggtggagattgcagtgagcccagatcgtgccattgcactccagcctaggtgacagagaaaagctccatstcaaaaaaaaaaaaaaaaaaaaaagatgaatggagagacaaatatgatttggtatatataatggaatatcatttggcaataaaaaatgaattactgatgcatgctcaacatgtatcaaccttgaaaatacaatgtgtcaaggatgccaatcacaaaagtacttatgttatataattcaatttatatgaaataggcaaatttatacaaaccaaaaataaattaatggttgcctagatctgagaggctgaaagaaatgggggatgactggtaatgtaggtaaggtttctttttggggtgatgaaaatattctaaaattargttgtagtggtggttgcacaacccaggtaatatcctaaaatccactttagtatgtcatttaaagtaattgtgcacttaaaatgaataaatttcatgtaatgtggattatatcttaaaacaactggttttaatttttttaagccaatgaagaaatgaagtgctagtttttatgtttattgcttccatgagaatattatcatctagaataacatgtaatgtattgagtatcaaactccagcatatcacctaataatcacttggccttaaacaagttacttgaatgttctcagatcctggaattttcacttaaaaatggaggaaataatacatcacaggggttttgagagaatrtattaagtaatggcacactttagatccctaatgaatattaatttccttcattccttccatcaggggccatacactcaagagaaaaataatagtcagggacaattcttaaattacgaatagggaattcaataaatacaacaaaccaaagattatatataaattttatgtttttgccaatggaggggaaagataactaaatgaggcaaggagaagaagaaaaggtggatagggaaactgcaygaaaagagagagagaagtcagatgaacaagcacaatgaaatagactcaaagaatarcaacttatgtaattttaaaagacatattgggccaaattaaatggtatttggatcattctaattaaaattaaaaccaggctacatttgcttgttcagaaaaattcatctaaaggtggaattttgctagtggcccacagggctttatatctcaatttggtttggaatctgatgaggtgattaagtagaaaaccatagaaacataaatgtcaccaatagaactaagcaaatacgtaacctctactgcactatcaaattttttcttgcactaaaaatttaaagcttttttattgacttttcattgtattaattgtatgctaaagaaacttagaccaaaatatackttcatttgaatgagtttcaatcactggtcttagaaagaacattcaataatatttgataggattttaccgctgtgaatggattttttaaagaaggagacatactatatagaatagcagtataaaagaatataatcactgaaagactaatttgtagttttgaagacatagcataataaagttcttacaatataataacctagtacatcataggctgataccatactagacagtacatcgcaggctgaatactgttctttcatgagatttatctttgaaaataaaagtcatctagtttctacaattaattaatcgtgtatccttacagtttatattagctaaatattctcagaatacaatttttaagattcttgttttatctacatcgcaaagtttattcttcagtttttgcattttcagttgcattaatattatttgaatgtgggatagataggatatgttttaaattcttgctattaagcattgatattggggcttaataatggtttctctcaatgtcctactcagagcaatttaagtcacataatcccgaccagaagcgtatctccatggttgttttctatatccctagtacagcagtgataaagccatgaatgctgaatgtgccgtgttttttcagccaacaatgggcaaatgacatttctaaagctatgtatcagttcctacttctcatcattaatcccctgtcccttccaaacctcaactgttgctttaaaaaaaattaagaagacaacaataayctcttaatgacaccctgcagcagctttatggtggaaagggaaaggggtcatgtttactggcacatattttctttgagtgttttctccctttcgcagctcccatggaaaatttgctaacatatgtacttgcttttgttaatggcaatagtagatttaatgtgtttaattccctgctcccttttcttcctctaagtggaaaagacctctcaagcagtgtttatgtttcaccttcaaagttttagctggaaaaatgtttttccgtatttaatgaaagtttggtgactttctaaatttaagcaatttttaaactctgagtttaaaattcccccatctctaaaatagagatatacctaacaataatagccttttgtggaagattatctgagcaaaataaattagaaacatctaacaatatttcttattatttttataatcttcattctgagcccagattctctagcaaacagagaccaagataaaagcttattggccattattttattcaagagtataatttcagggaagtaggaggaaggaaaaagagagatggcatccaaaaagtgagaaatatatatatatatatatttatatttatatatatgggattgcaaagcctgacgcatcttggtaccaagcaaactgcagacatttttgacaatcttaagctaaagcctagatgaatcactgcatctcagggcaatccatttggggaaataaacagaaggattgatctgctagttcccatctccttaagttcaaagattcacctcgagggacattaacttccccacacttccaggtggcaagtgcctggattctgagatccctggaatctgacatctcaataccaacagggaggccctggaacaggagggaagaatttcaaagcacaggctgtggagacagaatttctgtcagaattgtccatctcgacttctcagagcccatgctggtcacaccgcagtaacagggccctccaagacaggtgaggctgaaagaatggggcaggcacagagaattatctgattcactctcctttaaaacaaaaggcaatatattcatttgtcaagtgacaggaagtcttttgaatcaatgtattcttgttctgtttgggagttaaaggcagtataaagaagcttgattataatcacttacaaaaacctatgaaaaccagattttttaagatgttgcaactaagtacaacttctggcttttattataagtctttttagaattgtatttttaattgacaaataattgtacatatttatggggtacagcgttatggtttgatacacatatacattgtagaatagtcaaatcaggctatttaatgcattcatcactgcacacacttatcatttctttgtggtgagaacattaaaattcactcttttagcaattttaaaatatacaatacaatattattaacaataatcaccacactgtgcaatagatcagcagatcttattcctcctgcctaactgaagcttcgtgttctttgaccaacatctcccctttccttgtccactccaaccatatcccacagcacctgggaaccactactctgctctacttctgagtttgacttctttttgattccacatgtaagtgtgatcacatagtaattgtttatctgtacctggcttacttcactaaaaataaagtcctccatatctatccatgttgtcacaaatggcagaactttcttcttttttaagaccaaatagtattccattgcatatatataccatgttttaaaaaatctatttgtctattgatggatgcactctgttcccctttcttggctatcatgactaatgctgcagggaacatgggaattttacagcgttggcttttttatcaacataaatgacttaatgttgatgataaaaaacaatgctgtaaaatatttgaagaggttgattctaagccaaatatgagaaccagggcttatgatacagcctcgggacatcttgagaacatgtgcccaaggtgattgggttacacyttaattttaaacatgttaggggcacagaagctacaggcaaagacataaatcaacatatgcaaaacatgcattgttttggcctagaaaagtgggacatctcaaagcaagagcttccaggtcataggtggattcaaagattttccgagtggcaattagttcaaagagttaaggtttgctggtaaatatctcttattagatcttaaaaggtgtcagactctctggaaaagacytaataagggaaagagatgctctatagaatgtaaatttcccctacaagagatggctttgcaaaatcacttcaaaatacgtcaaagaaatctattttggggtaaaatactttgatttccttcagagtctgctgtcatgtgatgctatgccaaagtcagggtagaattgggcatcttatttccacacagagtctgtttttcagtcttatgatctctattttaatattaatgctagtcagttgtccctaaacacaaaagataggagagtataataaggcatgtaagacttcccttccagtcatggcctgaactagattttaagttttctttgggatcctcttggccaagggggaggaggtccattcagttggttgggggccagggagctagaattttatttttgatttacaatgctgatttcaattcctttgaatatgtacctagtagtgggattgctggattattataaatttttatgtgtattacaattttgttaattaggtcactgtcttagttagtttgaactgccataacaaaataccatagactgggtggcttaaacaacagaaatgtgttttctcatagttctggaggatggaaaagctaagatcgaggttctggctgatttgattgctagccagagctctcatcctagctggtagtcagccaccttctctctgaattctcacatggcagagatagagacttctctctctcttccttttcttataaggccaccaattttatcaaattaggaaccctccactttataacccttttgactttaattatctccttaaagtcctgtctccaaatgccgttacattgggggttagggcttcaacatatgaatttgagaggaacacaatttagtccacagcatttgcatatcacagaaaacaaatccatagaaatgttaatacaataaagaatttgagtggtttaaaacctttttatttttgtgaatgctacaattaaaatatttctgcgtgcaaaaaattgtgagtttttcttgtatagagtaaaattttcygatcttaaaagcaagacctatgacaagtagaaaatattamtgaacgctgaaagcattatatccttgtcattttcagataagaaaactgtagttagtgatgcttttcaaaattgttacwtttgtgaaccagcaaatgtatgcacacaggattatctgagcctaaacatagtgtcataaccttaaattgaataagttagattaaattatttttaccagaaaatttatggctgatttccatacaataatccatttagtcaattcaacaatttacagggctgaaaatatttattgtaacttgaaattcattttatttcaagcaattaaatcacccagaatcctccagatacaaagtgtgttaaatgtaacctttaaaatgaatgaatgagctgaagacaataagggaagtccagggagcagaggaaaaggcaagagcagggtaccaaggagaagtataacgttgatgcttcctcacaacttgagggcaactacggattcagacacctggagtttgatgccagcacaaagcaggaaatcggactggagatcaagtcatacacagctgggacccagaaaggtatacacttggccttggagaggaaggaggttaggagagagtgacttacaagaaaacatgacctgcagtgataaagagtatagaaggatagatgcagccgggcatgttggctcacacctgtaatcccagcactttgggaggccaaggtgggcagatctgaggtcaggagatcgagaccatcctggctaacatggtgaaaccccatctctactaaaaatacaaaaagtagtcagccatggtggcatgtgcctgttgtcccagctactcaggaggctgaggcaggtgaatcccttgaacctgggaggtggaggttgcagtgagcagagatcgcactactgcactccagcctgggtgacagagcaagactccatctcaaaaaaaaaaaaaaaaaaaaaagaagaagaagaaggacagatgctagatagatagatagatgatagatakattaaaaaagagatatagagataaaggtatatttctcagccttggttctgggtggaggtttaaaaataatatttccttgagattttgtaaatgtaaactaagtcatatttagggttatggagccagaaatcacactaacagtagagttcacaaagctgcagagaatattttgtttgtgatgaatctagatctttctagcacccaaagagatatatcccccactcaagtcatccagaactcacaaatatgaactcaagctcaaagacacacaaaaaaataaggaaacaagcctcaaagtgctggagtctacagaaacaacaaggaacataaccagttgcatgagatttcagatatttgccttatcagatgcataattaaaataagaataaatgaatagatgttgtatttaaataaagaagaaataaagaggctaccaaaactgatcactcatatttgaaaaagaacaaaaaataacttctacttctgagaaattttaatgaataatattaaatggagcagttaaccagtagaatacaactgacaaaaagattatgaaataaatataaacaaatatgcatatacatatacatatatctgataacctgaagtatatttattgatatatatattaccttatatgtatgcatgtgtgtatcatgttgaactatatgaaattgccatgttgtatggcaaaaacagtcacatataggcaatttcatatggttaagcctatatatgcatattggattgaagatgcactgtataatataggttttccatataaaggtgaaaaaatattcttttgctctaagaattctcagagttctgtcccacagcagatagcctacatgagagtaatttttttatcagaattgtggaattcacacacaggtcatatgcttagttctgctcatgataatgatgctcaatagttaattggctttgtcaggcactcgtctatatcttcccaccttcctctccaacagtcaagtttctagacccaaggctcttgtttctccaaaactgcttgcagaaatagctatgccttctttgccatttattttaggtcaccacttattagtgacatctgatattagattcttgtgagatgaagattggagactggcttaagtatctgtcaggaagcttctctattttcagattatattgcatacaaaaaccttgcaagccaaatctgtttcagaattaaaataacatgagcaacctcaagaaaaattattccatgtgtgcacacgtatcaagaaaaacactgcttccatcatgccaccccacttcattgcttgcagggatcattgaaattcatttactcagtgatcagaatctcctgaaccctgcctccagacctcatttccaaacatacaccctaacctccaaaacaaatttggtctttagccttgtccaataaaaatagttattgttaaaagtccaaactctttaacatgctattttttaaaagcccggggttggggaggggggtgggtaagggatctccttactccacagaacttctaatttcccagacaatcagttgttcaagaacacaatgccattcctcatgctttctttgcctataagctgttctcacccacttggtgaaatctacttcccccttcataggtcaacccctcagtgaagtcctccttgatgtcttcagcagcatttaatggtttttcctctatgtccccttagtactttcttcatatctctacttgtctctcccactagactgtaaattcacttttgtcaggaccatgccatctgagtaccccagtgtctaaaacataacctggtactatatatttctgctgaataaatgaattaaaaaacaaatgagtgcaagttatttaaatcagaggaatcatgatagaaacattaatattttaatatgtaacagaccacaagaatgttaaaagagtggtcttcaaactcaaaagtgtatcttcccaatgacaccagccttagaagaacagtttctgtgttactattgtcatgctggaattcaaagggtttttcttggttcttatagagactagagcagtacatctccaaggctaattattcttctgatctcatggtttgatttatgtgaattgtgacaccctataaggaaagtaaaaagagatccacctagttataaacaatgctcattatagaacaacctccagccgagccaatgcagaaggcctcagggaatactaaaaaaaagatagtggattttttttccttgcaagcacaaaatattttttaaccataaaaagcaatgtgcaggtttgtcatcctggtgaaaggatgattaatttccatcgtgttagaatataacatacggattaccctagaaagttttaaattttaccaaaaaaaaatcaaggaaaaaatgtaaattgcagaatgattattgcatataaattttatatacttcttttagataatatagaagagatagccactcacccaccctgagttttactgtacaattctgtttttttaattgaaactgcactgaagcttttttcttcccgtgttttaaactgtgctgaaattataagatttgaaaagcctttgttaatagctagagagtcctgccattaccgaatgccaagagaataatgaaacacctaaaatgataaggcactagtgtctgagcagaatagacctttaattggaaaaagttcatgcattaatattcaacattaagtggtgattaatagatacaccatgtgggtattttttattttaggaggatagataacagcatgtccaattttaatgtaaatctagtgacaatttcagtgtgttattctaaaatgctctatctgattagtttcagaggcgtaaaaagaaaatcttttctagtgagcacatcctccgtaagtgttaacagcaaagctccttaaaataattttgttctctgaaattgttgccatagctagctggaagagtttcatgtttaataaccacatgtgatatctggttttttttaaatgaaatccgcataaagtgttcattttttctccattctagaaaaaaaaaatctactcttattgacctctttccttactctcactgactgatcaaggaaaaaggttttattttctctgtctttttatctattttgatggtatttttttttccaacgtgattgtgccagtgcactccagactggatgacagagcaagaccctgtctcgaaaataaataaagaatttttttttttttttttgagacagagtctcactctgtcacccaggctggagtgcagtggcgcgatctcggctcactgcaagctctgcctcccaggttcacgccattctcctgcctcagcctcccgagtagctgggactacaggcgcccgccaccatgcctggctaattttgtttttgtatttttagtagagacggggtttcactgtgttagccaggatggtctcgatctccttacctcatgatccgcccgtctcaggctcccaaaatgctgggattacaggcgagagacaccacacctggcctctccagggaatctttaaatagccaggtaataagaattctcagagtgaatagtacactgaatgtgaaagtgaagaatgacatccaggataacttttctctctttgtattcagggggctcagtctattaataaagagattttgtctaaccatgttccccacatattgctgtcaatagagtaaattgctgttatccatttaatgtgataagctcattatttctcacagcttcatctatcacccaatcccatcctttcaccttaaatctagacttctaatgccaaacaccttctggatagaatttgtgtttaactccacatctgaggttaaattttaatctacccaacgaatgtaggtttccttccaacattgcctgtttcttattaacacaatcagttagttaccctggctcaagaaattgagaagaaaattggacttatttgatccttcacttcatgtttctagagtctccaaatgaaagtttccttaaaaaactttttcaagccttgttttaatctagatcccacaccaaagcagaacaagagaccaagtcttatataaagttagtttatttgagaatataattatagagaacatacatgagaggcagcagttttgaccagggaaggagaaaaaaaaattcaaatcatgctattgatgagcttccccaagagcaagtgttgctcaatctcacaggattttctggggagccttatgaaataagtttgagaactaatagcttagggacaacaggggaaagcatttatccattggtccccatccccattacttaaggttggaatttaagtaatgcacttctgcttgtgcatgaatgaaggccaaatgtggtcccatggtgtattagtctgttttcatgctgctgataaagacataccagagactggataatttataaggaaaaagaaatttaataaactcacaattctgtgtggccggggaggcttcacaatcatggaggaaggtgaaaggcacatctcaaatggcggcagagaagagaagacagcttgtgcagggaaagtcccctttataaaaccatcagatctcatgaggcttattcactwtcacgagaatagcatgggaaagacctgccacctcccagtgggtccctcccacaacacgmgggaattatgggagctacaattcaagataagatttgggtggagacacagccaaaccatatcacatgggtatcccacaccatggtaccagagaagtctcgtggcagaaaataagaattatatggtctaggcccaaagtgagataccataaggctggactggggcaaagctaattgaaacatttattggaacttattagcacagcagtggctgggtaagagatggtctgagaggataagaaatggccaatataccctgtcttagtctgctcaggctactataacaaaatgccatagactgagtgatttaaacaacagcaatttatttctcacaagcatgaagtctgggaagtccaaggtcaaggtgccagaccattcagttcctggtaagggtccttttgctggttttcagacagctgtcttcttgctatatactcacatggtgggataaaatragagtaagctatccagtctcttcttatgaggacactaattccatcaacgaaaaccctacccttatgaccttatctaaagtaccttctaaaggccccagttccaataccattacattgggggctagagttcaacaaggaactktgggaggatgtaaacattcagtctataacacagcccatcccttgcaccattcagatccaaaatgccttttataaagtgcaagcaatcatagagttccccttcaagttcatttaagtcacaatctctgaaaaggtttagtaccagttattattggaacaaattccagtcttcactattgcagccaatttcaaggtcataattcatatttataatctcccttctttactgtttattctattcatttccctcaccatttgtaacactttggctggcctagggttctttgctagttggacccagacttttacacttgagagatcccagcycttagttgagctgcatttgttatatttgtccactcacattttccctagacctggaaacacagatattcacccctcatgaacactgcgattccacacacactccttcatgtccccattgcatctcaccaatcctagcacttcgtagaaattagggtcagtccctctcttagaatagtcattactcaccttggctaccgcaatggcatgggcagcctaaagtgaccaagtggtagctgtagtttcaacttaaagtgagacagagtaaaggttccactttgtcttctggtcaaaacaatctctttctagaaattaacaccatgaatcctgcaaaacctgtttgtggggatggggagcacagatttcacaagtgggtcactgggaatgatagtgagatgagccaattctacttttgccccttggttctgggaccaatgtattttagctactccagacagcaccatataacagccatcgaytgagtgcatgtaycacatccaagagaacagcaacccaacccataaggtattatacccaagtttttgtcttcactggggcctctagtaaccattcaattattctggttctaaatgatgagatatagacagacaagtgggctgtgtgtttatatgcccattcttcagtcttctgtatcataaaactagtctcctagactgagaaaatttagtgtaagaaaccatacaaatatatgtatcagatgtcttataagcmctaggacaataatgrtattagcagtgaccccagaggaagaaaaggcaaatccrtatgagaaggtgtcaattcatgagaggattaatttctgctcctccagggaaactgagtctaatataatcaacctgccaccaactggctatagccatattcttgaagaatggtgttacaatgagggcttagcatcattttgtgtgctggctagttggcagtagttagataagctttaaagaaggggagcccaggccaggcatggtggctcatccctataatcccagcactttgggaggccaagatgggtggatgatttgagatgargagttcgagaccagactgaccaatatggtgaaactccatctctactaaaaatacaaaaattagccgggcatagtggcgcacacctgtaatcccagctacttgggaggctgaggtgggagaattgcttgaacctcggaggcggaggtttccatgtgctaagatggagccactgcactccagcttgggtgacagagtgagaccctgtctcaaaaaaaaaaaaaaaaaaaaaagaagaaaaaagaaggggagccctgctgtagaacctgcatagatatctccctattattgtagtcactctgttcatggccccatcctgctagcactggggttgttaaaggaagaggcttgctgacatccacaggacaaatcttatgtatctggttaatgagtgcctcttgtgaggtagatgctccctgatgggcattaaaatgagacacaaatgaacactttgtggtcactttcatagatccaattgcatgtatctttctatgattttgttgtttatttctaattgtctttctttggagtcttaaccaactagccaaaccattaactgcccagaagcccaaaactcagatcatgttttcttgcatgcagagcgaactccctattgttatctttgaagttctgccttccacatgttttcttggagccatccttggatgaacctatagtgtaatgattaaccagtaaaactaacatgaaaaaaaaaatcacaccaacatgtctatgaatcaggctcaaatttctgattcctttgtcatttagtcacagggaagcaaatgatgccatagctatgagtggtgggtaagagactggtacctcacagataccttaggagttttcccacctgtttgtataatttactacatcttctggaacttctcaggcccaatattgaatagcacattcataatggatcattgctcttcctgctcaactttatgacatagtagattcgataatatccagctcagtcccatagtcaatttgtgttccaagattgtgcatgcagcctctaccagaattcagtatcatgtcaggtcaggaattatttttcaaatgttccataattctctgttatagaatgaatggccttgctctagtacactaggattttttttttttttttctgagagtcttctgtttaagtttgtcttctgcaacatacaggcaacttgccaggacatctaaaatcctacccagttcttcctaatcatgtcaaattaccatttatgtcactgtcttagtcagctttctgttgctatgactgaatacctgggactgggttatatatgaagaaaagaaatctatttcttacaattttagaagctaggaagtccaatatcaagagatcccatcttgtgaaggccttcttgcaggtgaagggggactctgcagagcccagaggctatgcagggcatcacatggcaaggaggcttaagaaagagggcctatctggctttttataacagatccgctcttgtgacaaccaaccaactcctgtgataacccaatgatctattaattcattaatatattaagccatgaatggactaatacattcatgaggccagagccctgatgacccaatcatctcttaaaagccccacctcccaatactgttacattggagattatgtttcaatatgagtttcagagggcacaaacactcaaaccacagccaacatagtgagccaacaggatgtgtttcagaatattaaaatgatgraagtcccaaagactgtttagtgacagaaagcaggagatttaacatagctctgagataaagcaataaatgtatattattcttcatctgtgtaagagtmatctgctttatttctcttactgagagggactgagggatcacatccaccaaaccagtagtgccaagcagcggcataccaagtgccagaggctgagttgatccattcttgaaaagatactaccttcaacttgtaatttgtataatcatttagttactttttagagttcattgtcatatgccccgatctattggttttattcataggctgaacaagaattaattagtgttatgaggggactaataacttatgcaagtcttaagtatttaatagctgtgttaacctctgaaattccttttgccatgcagtacgatttctgattaccatctttgctgaaatgggacaaggtggggatgcagmttaaggagattttacttggcctttccaaatataatggctgctgcttcrtaatcaggtagtcagtgtaaggttcttccgtctatagagtatatttatccaaattatatatttaggtacctagggaattaactacagggcttgtctagtttctgtaagatttatttgagatagacttcaacccaaactctacttatcaactgaagacaacacaggaatgaaagaaatcccacctaacagaacagatgagaactctagtaacactactatttaaaaaggcggcaaagaaaaacactcagcaaaagggacagaggaagagagatcagaacagagaatgaatgagagtaatatgcaacaaacctaggaaagaaaatattttaaagagaaagaagtgctcaccaatgtgaaataccactgagtatcacaatgggataaagaatgaaatgaggcaaatagttgtggaaaacaggaagacattattttcctttgctagagcagttgaagcagaagagcaggagcagatgtaggatcacggcagggtgagaagtgtctggaaactgaggaaatgtaggcaatcgagtttaaatatttcagtaatttggcccttggaaagaggaagggtgaggggatgatggcttgaagaggaggaagaaacaaagcaaggtttttgtggttgttcctgctgctgttgtttaggattgggatggtattaatatgtcttaatcagatcacaaacataagtcaaaatataagagagttcacagagattcttctttatcccaaaagtctccattcttctaattagaagaatgttaatgataaaaaaaaaatcttcctatagtctctttcttgtattagaatcattggtytcttatattggctgttttcatgtcctatatcttaattttattttcttattgctggtggcttaatgtagtaaattttgcaaaactattaaattytagactacagcatgagagaagaaaggaatagtcacaattacctggcctaaattgaagctgttcaaatttgaattattattgcttttgaggagacagcagcctatttcagtttattgttccttaatatatgacagcactggacaattaaagatcacacacacacacacacacacacacacacactgatgatggaaactcttgtattgcaaaatgggatattctggtgtgccagaaaagattgattaagcaatgaacctcagacaaagtgtatggttgtttccaaataatcaggcctttgggattattaaggttataaatgaaagtaggtgtctaatttctgatgaatgcatttaccactgtgaacacagatcaccagtgtgcacaagcatacatctgtgtgtgyagtacactgtttttagaagatcccatattctatagaagttaatttcctttattgctttttattcatagagtgactctgaatgtgttctcatagaaataaatctgaatatatgtgatgtgtgttgtgaagatgtgtgtgaattcatacagaaatacgtaggttcaggtataaatgaacatatttgggcatatatatttgtgtttgcatgtgaaaattaaggtttagtgacaagtgctgaactcaaytgtgttgcacttgtgtctttaaatataataaaacattttcttttaaatgttggaaaataattattaggcatgtatcattaactgataaaaacataaatttcttaagaaatgctatagccttaaaagttactaaattacaaaaaaaattaaattggagttattgaaaaaaaattgctctaactcagccctcttttatagtaaagtattaactataaaacatgtgaatccaaaatattattcttaaattgatgtgatattaatgtatgtttaggaaaaatcaaaagggaattcttcattgaacaaggaatctagtaacagcacttcatagagccacatcaggcacctacaggctcattctctattaagtttttcatctaacataggctcgctcttcaacactgtatggacttttatgattctatagaggaagaaaataaaatggaagtcaaggaagcatttttattaggccatttactcctcttaatatagtctttccctttgagcatttacaataaaaatggacttaatcttttgccttcccatgggaagtctaacaaaaaatggaattgtagaaagaccacatatatcaaagtatttttagaaactgctctttcaggaagtggctaagttctatggctgatataattaagtcaatctcagggagcttcaccattttttgacacccagaagcttagctttagcatgagttggaattttttttcttttcttataatgcgccactaaattctaagaccattagataattgtcctcaatagaaagttcctgtaatacattgaaatcatataatattttagccactggcatatcataaaaatttataacccaaagactacatttatttctaattatatttgctttccttagccaccaagatctaagtaacagataatatttatatttctaacaactgtgttttatttatgcaagcgaagaacagaaataagctttcattaagaaacaactatgtgcctgccactgtgaaatatgctttcacatatatttctgactccttgcaataaccctaaaagattaatatcattaactcattttatagacaatacaaccgagaagttagattcagatccagatctttctgattgaaaagcccctactttggactgacagagagaatgaagacttacttcagtttgattgtcttgaatgggcttcagttattcactgttctccaagccagccacacttgcctgaaattggatttcacaggttcattttacctccaactgagaatatggacatccacaaccctcagtgctggcccgtggaagtctcaatgacccacaaggcatagggtttgtggctttggtcctggttcatgtatccatcaaccaaccattattgagcacctagtattttaggggctaggaagaaaacagaaaaagtttcagcctttgtggatcttacattctatcagttctatgtgtttaggtgtagggagatatagataaatgcataaataagtctctgaatactctttgaccaacatcaccaaaaccatacctgcttaaggacttaaatctttttaaggtaggccttatggaagttggggatatgcattattatagcaatggattaccatctgccttgacccatctacaaaccaccccagtttgtagttaccctgaataatttaagagtcaaaggaataaaccccaagtcaaaaccagtgtccccaaaacaggggcatgaggcgaggcaagggttaattgttgctcccaacacagtgctgctcccatctttaatgtgaagataaatatgagagcgaaaaggagaaatctaaagtggtcgtgatgggtctgatttaagtgaatgggagccacttcaaatgctaacaacatcattaggagcacataaataggctgctcattgtgtcggtaaaagcggttgttcacagcagcacaatattgtttgaatgttcgaaacaatctcttaatataactccccaccaatttttgttttggtttagtgtttttaaatcatagttctttggcaccctgaagaaagtcttgttcccatgtgcatttttactttctctcgttatgttttgtctttgaccttctgagcgcagtggagaaaacagacgtgttccaattccagggctactatttatatgctagctatagctatactttttccaaaaaaaaaaaaaacaactctccgaatcttggcttttaggaagttcatttttactatatgaacaataacgcctaccacagagtgttttgagaatcaaatgaaacttaacttgcctaaatgcctaagtaggcatctggtaaatttagctaaatccctggaatatctgttcggtttcaacaccatatgaatgtaatattttacagaaactctttttttttttattttgcgcctgattcaagtagatcttcaatgaatatttatgaattaaatattttcaacataatgcacataatgaaagtaactatgtacaacttgatggttgtcatatttggggcatatcaaatcattgtaccatgagtgtattaattcaggatcaaaacccagttttcttagtactttttctctttagagtgcggctcaacactagaagagctctttaaacatcagagctgctccacaatggaatgaattggatagttaggggtaaactccacatttctgcacatattaacaaaaaggctgaatgaacacctatcaagaaggtggtcggacaggatttccaaattagttgaaattggccccaaatgacttccaagttgtcccctctcaatgatctcataatactaaatacatagtgtttcatttagatgcaagtaagaaaaaagaagctttgatttcctattgcatatttcacaggggtactttgagcactactccattccaaattccctttatagaaaataataatccctcacaataaaattccctgccaaggcactattctgagctttttacatatattaacatatgtagttctcacaaaaaccctaagaggtatgtactggtggtattgctctgtcacacataaagaaagtgaggcacagaaaagctaaattacttgccccaggtaaagtaaaaaagtaattgttggagctaggagttgaatccaggcagtccagctctgaagcccactagcatgcagtaccaagggcctcacataataaaatctggcttctcatagatccagactttgtcccactaatctagaagcactttgaaggcaggggccatttctgttttcatttactactgcacctacagtacctgacatataatcgttaattaatgaataattttgtttcatgtataaagattatcacttatttttcatatcttgtgtcatagaaaaacatattgcttagctttcataccaaggtattatttactatttagaggtaagaagtgtttcagaaatatttgtactgcattcagaatcaaaagacctttggcccggcacagtggctctcacctgtaatcccagcactttgggaggctgagacaggtggatcacttgaggtcaggggttcgagaccaacctggccaacatggtgaaacctcatctctactaaaaatacaaaaattagacgggcgtgttggcgcatacctgtaatcccagttactcaggaggctgaggcaggagaatcgcttgaacccaggaggtggaggttgcagtgagcccagattgcactagtgcactccagcctgggtgacagagcaagactcttgtctcaaaaaaaaaaaaaaaaaaagagccaggttcgagggttcaagcgattctcctgcctcagcctcctgagtagctgggattacagacatgcgccaccacgcccagctagttttgtatttttagtagagacagggtttcaccatgttggccatggctattcttgaactcctgacctcaggtgatccacccgccttggcctcccaacgtgctgagattacaggtgtgagccactgtgccaatgtgccccattttcttaggctaaagcctgaagtcctaaacaagacctacaaaaccctgtgtgatgaaacccccagcagcctcacctgctgcaccttgtaccgctgtgcctattgttccctgcctttagtcaatctcaccgtcatttcttcttcatgcctgtgtcattcccatgtcagtggctctgcatgccattccgttggcctagaacatgctctcctttccccactgccatccttacctagttcattcctactccacaaaagctactctctgacaaagacacagtctccaactcctccaactgaggcaccttgcatcatgacaggctttcatcatattctatacatttccattgtgcaaagtaccaatattttaattagcttattcagtttcttattcatttgttcaacagattcttgtaaatgagcacctattttacactgggtacttttctagtcacaaaatatagccatgaacaaaatataccaaaactcctaccttcatgtatcttccattctagtgagtaacactaagtatcctcactaaaatataagttacatatagtctgtgactatttctgtcttattcactgatgcatcccctagcacctagcacgaattgttgcttatggtatatttcagcaaaaatagcttgggtaatgatagggaaacaaagaatcttaacattttagtggcttaaagcaatgaagtgttttcgcttttttgttttgtaagtcattctatatgcccatcaggttgactgggaatgcttcctatatgcccatcaggttgactgggaatgcttcctatcttgccacagtcattcagaaacatgggccagtggtacagacattatctcaaatattgccagtcatgacagaagagagagaaaactattcagagatttaaccagtagttaaatgactccccagggttttagccagaagttaaatactccagcttagacatgtgcaagacacttccacttacgaatcactgctaaaaactagtcatctccccatatgcaactataagtgactgcaaggaaaagccatattttaattgacagctgtactactggctatctcagatggaaaacaagaaatatttgaggaaaagaagactgaataacaatgaacagtagttgtgatatagataaaagccctacctctttgtctaaaatatacctgttcataggatgtgcatagcatggatagattaggctaatgataacataagtttgcattctttcagcttacaaagtctactgatagtttgattaaacacaaccaagaatgacaaatttgctatccacaacatatggagtagacatcctacagacaaataactgagaattcacagtatattaaaaattgtttattcatatgaactacaccatatttcataggtcaatttcattagactggctcacatggctggtctggcttagacacagtctacagagttgattaaaaagtaagattgattgcacatcttgttcttcttgctgactataattttgtattttgcctgaacattcaattttctatgtttaattaaaaattaattaaaatttgttagagtataaattgcatctcatcatttcattgaatcctaactataggtcatgcctcttaaacgcagaaatggtctaacattttatttcaatatgaagtagaagaattgtcaggattattttggtgcccagatggggatttggtattcgtttaactaaattctgctttaatgtagggcatgaaaggaggctttgggacttaatttagaaggtttagcaagagtgataagaaaacccaataggaagccgggcacagtggctcatgcctgtaatcccagcactttgggaggctgaggcaggcggatcatgaggccaggagatcgagaccatcttggtcaacatggtgaaacctcatctctattaaaaatacaaaaattagctgggcatggtggtgtgtgcctgtagtcccagctactggggaggttgaggcaggagaatcccttgaacctgggaggcagagattgcagtgagcagagatcatgccactgtactccaggctggagacagagcaagactccatttcaagaaaaaaaaaaaagaaaacccaataggaattcctcctcaaggtataagatttttgtaaaatctgtttgcttctgcctagtggaatcctcaactacaaaattctgatgattataagaccttctgaaggaacaatccacaatactatgtcttagatcagtgcttcccatctggggtccatggacatacactcaggagcctaagaattctctatgtaaattgttaaacgttatgtttctatttgataacaatatatattgttcaaattttataaattctacataatcagggtgacaaatgacaaatgttgtcatttgcctttatgtttgttatttcactgacaccaagcagtactataatgctttagttattctaactatttaatatagtagagaataataagagaatagtggactcaaaccaagtatcatataaatgataagctaagtaaaggatagttttaaaataagaagattaacgtcaacataactacataaaactaaaaagaacctgtactgtcacagtcagtacaaaaatacacccaccaaatgcastgtagagtcagcaaagatcatctgccatgttaaggcaatgctgacaatttaaatcttgagctttttagttttatttgattggtaaattgtgttatattccatatgtaccataaacatttgatttcttattcatctgagagtttatatctgatttgacttcactaagaataaaattcaaaccccttactatgatatataagtccctgaatggcgtggtctcttcctatctggcttgttgccaccttgccacactaccctttgacatcacactccagcttcatcggcatttctggcagttctttttctactggtgtgtcttctgcctggacaactcttcagactctcaataaaaatacttcttggccaggtgcgatggctcacacctgtaattccaacactttgggaggccgaggcggatggatcacctgaggtcaggagttcgagaccagcctggccaacatggtgaaactccgtctctagtaaaaatacaaaaattagccgggcgtggtggcacacacctgtagtcccagatactctggaggctgagtcaggagaatggcgtgaacccggcaggcggaggttgcagtgagccaagatggcgccactgcactccagcctgggtgagagagcgagactccgtctcaaaaacatacaaacaaaaaatacttctcatttctccaatttcagcttaattatcccctgtttggtgtggccctacttggcttccctatttaaagggaagtccatttactgccctacaatcacttcttaccagtgtcccttgttcatttccttcatggtacttagctcaatttataattttttattttgtttacctgattattgcttgactccccacctaatcaccgaacatagaatagacacacacacacacaccagaatgtgagtttcatgagtacagagatcccatggtcttattatttattttataccaattccttaaaagagtgtttagggccaggcactgtggctcacacctgtaattccagcactttgggaggccaaggcgggcagatcagaggtcaggagatcgagaccatcctggctaacacggtgaaaccccgtctctactaaaaatacaaaaaaatagccgggcgtggtggcgggtgcctgtagtcccagctactcaggaggctgaggcaggagaatgcctgggagatggagcttgcagtgagccgagatctcgccactgcactctagcctgggcaacaaagcaagaccccatctcaaaaaaaaaaaaaaaaaaaaaaaagagtgtttggttgtttggtacataaaataaatagtatttgactaaataacaaaatccatctctcactatgtccagaactatatttcttaaagtctttgctaatttttatgagaggaaaatggcatgttattattttaatttgcctctgtgattactcatggcattggacatttaaatatgtttattggctatacataatttgtcaggcaatttcacatactgtactttgcctagttttctgttgggaatttttttatttatttgtgttatttgtataatcagaggaataatattataatcaacttgtgtattaaaaatgtctccactttgctctttggctttcaatatgttgtgatttctttgggtacccaatgctctccttttayggcatgaaggctgttcagtgtttttccagtggaagttattaatcatacttcatcagtgaataatctgagactaagagaaaaaaaaccttacaaatgactcatgtttggtagaatctgtctaactctaaaatgcatattcttttcactctatgtgtcaactgacttccatacagttggagaagcaccttatctcaacatttggcaacagatagttgtcttagtcaatttgagcttctattccaaaaataccatagactaagtggcagaaattggtttctcacagttttagaggctggaaagtccaagatcaaggtgctggccagtttggttcttggtgagggctgtcttcctgatttgaagatggatgcctccttgctgtgtctcacatgtgcagagagagatcatctctctcatgtctcttcttataaaggtgctaatcccatgcatgagggtttcaccttcatttcctaattaccttccaaaagctccacctccaaatatcatcacatgggggattaaggcttcaacatatgaatttggggtgacataaacatttagtccatagcagatagttaagtaaatctatatttctatgcatatgtttaagggaggaaataagtttcattgctttattgtcatattcacatgaatatgtcatgaatatcatctaacaaaagggatccagggatcctgagttttagaaagcctatcttgatggtttctaatggaaattgcttatttgcctgcattaagtttgtgccagccaactgaaacttttatgtttctgagctttggaccaaacttttatcatttcagtgtggtgacagtgtatctcatattaatcagaaactctaattgatcagaaactctaattgatatgagttctaatcagaactcatagttccatatgcctttggttaatacaaatgggaaaaggcattattttctaattacctattaggtagacaaaaatattttctaacctagaatccatgaggggagaagataacaatattactctttgcacaaaaaattttaagtcattatctaggaccatctttattcccatctgactgtacaaagtattggccgttaagagaatgaaggactttaaaatgactgtttatcatttttaatttattagaagtcagttaattattacatactgaaccacaagcttatttaatactagaagatgagttaataataaactgctccatttcatcgagagtgatggaccaatacagttaccaatgaagcagaaccaagggagaaagacatgaggtacagtgacaaagaagtgggagagagttgtaatacaatattttcaattgtggaatcaagtgcacatttaaatatttttgtgctattgctaaaggaaatgctatttttgattaagttattaaagtcattaaatttaattttttattctttaactaaattattttatattaatctgtggtttggtcaagttgtctttggcctaccatcccacaagaagtcagtgacaatgttgggaccagaattcaggagtcatcagagtccattgttgtattcttataaccatacttcactatctcagaggatgatttgatttgtaattaccacaattacacatgcaatctatcttctgctggccacttctgtgtatgcggccattgcacagggatattgttaaaataaattgcataacacatgtagggatacatgcagagataaatgatttctgtaagcccagaaaagatataaagagccatgaaactttaaatgaaattcgtgtttctggagcagccaaatcaatcatgatccccagcaagaacatgctttgatcagcatcaatttttcttacagtcttacatacaatagtcatcttgaaatactgtcatttaaaaaattaatttccatagtgatttttatccttgttttggtgttatagcccctttatttattcaatttctgattaggctgattatatgcatttttttctctaatggacctccttagttgaacaggcaataatgccataatatgcgattaaatacaattatgactttcttctcaagggcttgaaatagtcacagtaaaaaataaatgctataaatgcaaagtgccctggtagaattgtgcttatagagggaaacagcacaaaatgtcagataaatgatgaggctcagaaaggatccttataacattttgttaactttctgtcagttttcattttacataacaagataaactaaaaaacaacaatacgagaacaattttgggtcaatacgaagtgaaacagaagaacattttgtctttccagattggtttatctcatcactaaagtagcatagacttagcgattaaatagtataatgctgatgaaaataggagctaaaacaaagacatggaagtagtccatggtttggtacataaagtgtgtttctgtcatttgttctttgcaatatttaattcagtcacaatctcagtgatttccttgagcttttggatcacagaaatgagaatgctgctgttcctccactgcagggctctggacccctcgttgtttacctgaagataagcttcatctctcagttaatggcaaaattatattctgacctccaatctagtgcttttgttaactcagcattatttagaaaagtctaaggacaagtgtcagtctggaccctggtgtggctgctatgtgaaattcagtttatctgaaggctcattgaaattcattttgtgcataaacaaaaaactaccaggttccccccacccccaattcatttgatcaccagatctgaaagtattgaataaatccgtaaaacctagtgcagtgtctaattctgaagacacttcaaaatattagtcttggggcaattctgggtactgtgagagaaacagaaaaatcagaagatgtatttcttccttcaggtactttaccatctacttggagtgccaaagcagcagaacaactagagaataaaagctatgtgtgtattgtgtaaccagcttatgtactatataacccacaaccaacatccaacctgcaattacagctagggtttctaacttttctctaaaataacccaaaacatttttactcctcttcttcttcattattctgaaaattgagcaatataaaatttttaaaaagaaggggaaaatgaaaactagaaaggaaaagcatacagatgactatttcttcaaatttttctctgatctttgtgtgagagacttgaaacgaattgtttatttatcaagctcattcactttaccttcctagcaatttcaaagttgactgctcctacaagatgaggaaattaaatgatgagagagaagtaggcactgatgggatgggatgagggatttgatgataaggactgatttgatctccttaaaatcctagactctagcccaagattattgtcttaagtattctcttctgttatcatccaattcagtctctaggattgagatactattgttctaagaaagaatgtatattttatatctactatatgaatctttccctccttcagatatgcctggatgcttctctgtgggggtgggtgatttttaaagatgttagtcattattggtctctactagaatcacctgttctttttttttattatgccacattggaaaaagaaagataaattcagtcatttttcctttatactctatggaaggctgcattatcaagtatctctccccaaataagatcaatcatatcctgttttgataaactggccatagtgttactttaccttctttctttatgtcgtgttgagaaagttttttaacctcaagggaagtcaaagtttttgttttcgttgttgttgttgttgttgtttgagacagagtctcactttgtcgcccaggctggtgtgcagtggcatgatctccctcactgcaaactccgcctcctgggttcaagtcatccttctgcttcagcctcctgagtagctgggactacaggcgcccaccaccacgcttggctaatttttgtatttttagtagagacagggtttcaccatgttggccaggctggtcttgaactcctgacctcaagtgatctgcccgccttgccctcccaaagtgctgggattacaggcgtgagccaccgtgccctgccagaagtcaaagtttctgtgtcaatgttttcacaaacattatctctgaggtgtggaaatatgtcttatttcccattttaaaagtgatatataacaccgttagcttctcttagcctcggtatctttaaccgtaaaatgargtatagatataaacatttgtccaatctctccaactagattataaacctcaagagataatgaataataaataatgccactttgtatctctagtacttaacagagtgcctactgactagtagatgctcaataaaagttgagaataattatatttccatttcttcactttcttgaataaggtggatttctgtattatcctataattattatgtttaaaataatatattattttatagtaataactaagtcagatgatctaagttaaaactttcatcggaatctaagaagagaagaatttgatggaagtcagccaacaaatattatgctgcgtcaaaacagtgtagctgtctctcactgtgccaatttattttacccaaggtgttgcaactttgagatacctgacaaaaaaagaggctcaaaggtattgccagtctacatagaccatcatatgttggtcccgtctgctgagaaacgtgggtttatgtggaagtttttcctgacacttagaaaacagcataagccaagataaaatttgctttcatttgtcaatgcaacatcaattcttctacaagcagtagactggagttttaaagtagtgacaacccacaggacgtattcttccatcgtcttatatataacaagctgtttctctccctgtctattaggctattcttacattgctataaagaaatgcctgatactggataattcataaagaaaagaactttaatgggttcctggttctgtagattgtacaggaagtagggcactgtcatctgcttctggggaggccttgggaagcttttacaatcatggtagaaggggaagcagaagcttacatgtcacttggcgagagcaggtgcaagtgagtgcaaggagaaggtgctacacacttttaaatgaccagatctcacaagaactcactcactatctcaaggacagtaccaagggggagggtgctaaacccttcatgagaaatctacccccatgacccaatcacctcgcaccaggcgctatctccagcattggggattacatttcaatatgagtggggatatatgatttggatgggaacacagatgcaaactatgtcaccgtgttaccctcccagtagggacctctagatttaacaaccttagggcaagggagtaggagagcctcatggtaatgattcctgcctgattaaggtataacaaagagttattagttaaagaaaaatgaaaaaaagagagacagacaaacagaaagcaggaataaaaagttttataaatgcaagaaaaaatgtttgcatgaaatgacacaagaagtatcaaatgaataaacacaatttatgaaacgtgcatgtcatagttaattttatatgtcaacttgacttggccatggatgctcagatacctgattaaatattgtttctaggagtgcctgtgaggatgtttccaggagagataagtattggaattgatggaccaagtaaagcaggtggcatactccaatatggatgggcatgattcaatccattgagggctcgaatagagcaaaaagacagaagaatgctgggttcacctgctctctgctggactacttgggttgggacatctatcttcttctgcctttgatgcttctggttctcaggccttgagatttagcctggaatctacaccattgaccctctagctttcaggcctttaaacttcacttgaccttcctgcatgtccagattgcagacagcagattctgggatttcttagcctccataatcatgtgagccaatatgtgataataaatttctttaaaaatatggattagtaaaatttgcatcctaatgaaaatgtaagcattgtgacagagaatgctttagtcagtctcaaatcctaaatttgagattgaaatttaagatagcttaggatgargaaaccacagtgtccttattgaaggagtgacttactgacttctacatccaatacagctccttatatttgacaataaaattgaaacaataatagtttaaatcttggcacatagaaattatatgtccctgacctactaattttctgtaatcaggatgctagacaattaacttcctaaagaaaacacatggacaattatgcaatgtttttgataatgaagcaatgttagctcactaaatgaagtaaaatctgaggaagctatgagaagtatgaagttgattattatgaaaaagaagtttgagctgtatcttaaagataatgaatgctccttaggtcagtcagtaagttttaaaattacttaactgaaaaaattaagagaatgtttgataatttaacatgtatctttacttccagagtaaattaattatccagatttttatcccactgctctctaaattgttctattcaggcaactatatatggtcaaagttgtatttgcctgtttttctccatgtttgcttccattgtctacacaaaaaacttaggctattattttatgtgaaaataaaaaatagggagttacatgcagttctttttccgctgaccaaagaaagttttcttcagaaagagcagtcccattttttacttatttaaagaatccacattctttgttcttcctggacatatgccttttgcttagaatgggaacagaaaaggtgagactgcctctagagaagctgaaagcaaagtagtgggtctgtaagatctcaacataatcaacagtagctgtgtattcgtagctgtgatacagaatgctgtcatacgtctcactaccactccaaagctttaccatgctgcttagcacattgaagcttcatctcagatcttgccggacttatttgatatttaagatggagagtctaaaggacaaaactaaatacttccatgatgtttaaattgggcgacagaaatacaacctacttagaaagtggtgtcatgttattccatttttcaagagtttaatcctcacattggttatttgctacgaagactcaaggcatcatttcacttgacttagcctagccctatcacagtgatggcaaaataagttatattagcccagcagcatgcatcagacagtctgaaaacattctaaatgattaccactgaataagagaaaagagagccatcaagcctcattgagagaggcatgtccagtcatctaccaagatcatttaccaccctgttcattgttttactcagcagacaccctcacgcagctctcttcagaccctgtgtcagcgaaattacaaaatgtccttgggatcattcacacgcagttgaaactatgaatctttaatctggaaatgccaaattttctgggaagaaaagcatttgaaaaaatgccttacaatgtcattatttcctgccctaagggctactcctccttttgaaaaccaatttttagaaattagacatttttcaatactttgtaagtccttaaaccaatgtacgatgtcagctgcaatattttatgtgtttcaagacaaataaaattcttttttattaacagttatatgtctggcccttaaaatgctgtaaaataaaatgcttcactgtgtgaaaggctatcatggggtcattggataagttaccaaacatatttttcctgtttttaggacattttaagtttagcttttgctgctgttgaaataaagaaaacccttaattaacatttctgcaacttctcatttttttgtcatcctctgtataactagttgagtcattacatgagggtaactctaataaacaaatctagtaattgttctggataacattttattttgtatcttcttataaatgaatatttgatgatctttacattctgcagaaagatttacactttcaaatgctagccattaattagtgaaagcagtacaacattttataaaacacatttagtatttattttttaaaacattccagtgtatagaggctttttgttgttgttgttttgtttttgtttttgtttttgttttttgagatggactctcactctgtctccaaggctggagtgcagtgacgcaatctcgtctcactacaaacttcacctcccgggttcaagttattctcctgcctcagcctcccaagtagacaggattacaggcatgcacaccatgcccagctaatttttgtatttttagtagagatggggtttccccatgttggccaggctggtctcgacctcctgacctgaggtgatccacccgcctcagcctcccaaagtgttgggatcacaggcgtgagccaccatgcccggccttgtttttgtttttttgagacagggtctcgctctgtcacccaggctggaatgcagtggcaccatcttggctcactgcaacctctgccccccaggttcaagcaattcttgtgcctcagcctcccaagcagctgggactacaggcgcctgccaccacgcccagctaatttttttgtgtgtattttttatagatatggggtttcaccatgttgctcaggctggtctcaaactcctggcctcaaatgaacccacccacctgggtttctcaaagcgctgggattataggcttgaacctggcctgattaaagattcttgatacaattaatgattgggtgtgatttatgtagtgaatgattatatgctttaaataagaatacattcatagatttttaaatcacactttaagatcaaaaaaagattttaagatattttaaaagatggaggccaggcacggtggctcactcctgtaatcccagcacttcaggtgkccaaggtaggtggaccatttgaagtcaggagctcaagaccagcctagcaaagatgataaaaccctgtctctactaaaaatacgaaaattagccaggcatggtagcgcacacctgtagtcccagctacttgggagactgaggcaggagaattacttgagcctgagaggcggaggttgcagcgagccaagatcgtgctacggcgctccagcctgggcaacagaccaagactctatctcaataaaaacaaataaataaataaataaaaataaaagattgagacttttttaaggggtgaaaatatttcatttgagcaaagcattcctcagctaaaaaaaacaagttttaaaatttctgatttaggaaccagtaatatattgaaaactgaagtttaagtgtcaatatgctaaataaatatttccatttccctaagtacaaatcataaattgcgaagtaactagaaaggaaactattgatcttcagcttatctgcctttgtgcagatatttatccggttcaatatttgactaacttgtctaaccgtaagaaccttgttaaaatactgatacccagaagtaatttaacatgtcacgacatacgtttagaaaggtctcctgtttgcgttagaggagtgttcttcaactttgaatcacatatgaacaacgttcataacatttaaggggtcttgttaaaatgcagatttcgatttatgtattacaagtttctgggtgatactaacactgctgttctgcagaccacatcttgagtagcaaagcattccagaagcattcaagatcccagaacaggacacctcatctagcaggtcctccacaaatgtttattagtcaatcagaatctagctaggtgcagtggcactaaacgtctttttttcttttctccttttttctcccttgccctagcttaaagctgtgcatagaagttattttattttatcctggtaaattgagcacttctgtttgttttatagaggtgtgccctttctgttgagtatctttctaagagccattatggtgtgactcatctttctgacagtatttattttaaattttaatttattcagctgcttcaatcacattcataagttatcttttagaataccttctctccttcacacttaccttggccagaaacctgatcatctgaatacttgtaagagaaccaagaaagtatagactaattgtttattttaaaaagcacaatgaaggaagaaatggatgtgatttttttcttggaaacgggaatttaatcacctaatagagtctcttagaaaagtaccattcccaaatctgttcttgattttgaatactaaattgctctaaatccacctaatggttgtttaaacctatgacaccatggagaatgtgagaacaataccgtctatgaacctcttcaaraataagctcaaaaatgaactccaccaattgatgtggaaagtatttcatgcatgggacgttctaaccagggamatgggaaagagctggcatagcaaaggtggaggggctaaggaagaacactgagagatgggacagagatggcttgccaattcacgcgtcacatgagaacaccaaaagattttggaaaatccataaataacctaaattctcttttttcctggcccgtccagctacctcccccccaaaaaaagaagccctaaacagcctctttgctatgtctcagctaatcagcttatcagcagctcacataagaaaaggtaaataatattcgctatttcaaattgttcctctctccacttttccttacataaatcagggatttgttaggtgaaatgaattttttttttttttttgagatggagtctcgctctgtcgcccaggctggagtgcagtggtgcagtcttggctcactgcaagctccgcctcccaggttcacgccattctcctgcctcagcctcccgagtagctgggactacaggcacctgccaccacacccggctaattttttgtatttttagtagagacggggtttcactcatgttagccaggatggtctcgatctcccgaccttgtgatccgcccaccctggcctcccaaagtgctgggattacaggcgtgagccactgtgcccggcctatgtgaaatgaatttattacacactccattgattgtataagtaaaatagcctggtaaaaattagctgcatgtctttttatcattctttgaaaaacgagaagtgtttagtttgaagtatctaagtaatgacaaccagcctgaactattaaaaggatgtcaggaagaagagagcaaacatgtcctttttgctacagaatgccaaaattataatcaacaggtaacaatcgcaaggataaaccttgtttgcctaacaagataaaggactttcttaaaatcagaattccaataaagtctctcatttaaattcaggggttagataacttagaatgggacaaatagcacttatattttaatctctaatttatttgtctgtctgcaccacttgaggccaggaactatttcttattcattcttgcctcttctgcacctaggagagtgtctagctcatattcattaaataaattttgttgagcagtactgaaaggcacagatttaagactttggaacctttcccaatactatgcccttgtcgtgttgaatgaacgaatgaatcatgagtttcaagcctaatgtttcccacatgtcatgattaatggtcaaactaaatcttggttcctctttctctctctctctctctttctttttttttttttgagacagagtctcgctctgtcgcccaggctggagtgcagtggcacaatctcggctcactgcaaggtctgactcctgggttcacaccattctcctgcctcagcctcccgagtagctgggactacaggcgcccaccaccatgcctggctaattttttatatttttagtagagacggggtttcaccatgttagccaggatggtctcgatctcctgacctcatgatctgcctgcctcggcctcccaaagtgctgggattacaggcatgagccaccgcgcccagccggttcctctctcttaattcagtttcccagggtctttactgacagccctctgttaagaactgagcagtttcttgtatcctatcagtggttttgccacttccttcttttttttttttttccccaccaacatgctcctctctttctctaagtgaagttgtgcagttttttttctctaagctataaacaactacacttgggatcccaggccttcccttcattacccttatgaatatgcctttgtgtcagtggttggccagagacaaatagtaataatagaaaatcaatatactgtatggggagaagtggaaaagtgcctggatataagttttacattaaggttcggtctatacacaatcatattgattagatgtaattgatagattatcttagtattattcacatgacattatttgtgccttcctgagaggattctaccctcccatgattcgtggaactatctaaacaacttcctaggaatgatcctctcctttactcctacacagtccaactacatgcaaaggtgcccggcacatggttaaaaaacaatactacctgtgcaaatacagacgctactcagcttataatggacatacagcctgataaacccatcataagtcaaaaaatacatttaataccctgataagcccatcataaagtcacaaaagcataagtagaaccattgtaagtcaggaaccgtctgtataaggtatcaagacaaataaaagtgaataccacacatactacttgtgaacttttaataactctgaacacaaacagcttgaaaacaataattggatagatggtctttaattcatgtctttatgaaaatagcaaaagagtatattgagaatgattgaatcaaatttaacaaaaccttgcttctcagtgtgactcctcgaccatcagcattgaaatcacctagaagcttactagaaatgtagaaactggggcccaccccagacttactaaatcagaatctgcatttttaacaaggtccccaagaaaatcagtacacgcattatgtttaagaagctactctaatgagtacgcattaagtattgatcacactccagttccttcttagaaaagaactgacggcacggcttaaccagtgtgactaaaggaatgatctcagtgttggtctgtcctaaattttcctttgtgtctaccctgaactgagattcgccagggcctttaatactaggatttagtcttcctttatgcatgcactcaaattagagcctttgtcatctgagtctttacagatgatatctctcaacagtgctgggagtgtggcctaaagcaatgtaatactaagtgaagtcagaaaactggctacccatctgcaaattgtttgttacttgtctgtcataatatagcaactttggtagaatatgcatgatgacataagaagcttgtgccaaaatgtaaatcacctacatcactaggcacactcttaatttcagctgctatttttttcttagtaaaactttttcaatgaaggaagtagcatgttgatttctactcaagcatagcttgttacctccttgtggacaagaactttgaatagcacaggcaaagtgattaaatgcagaaggctgctctacttgctgcagtgtgaatgtggttaatcacaacaggccctacatattagagcacaaattaattatggctatagattaactgctttgttaactccataatttctctggggttcacagctagattcccagtacctggcacagagatggccttcagtgtctgttgagtgaatgaagtgcctagctcaactctcattgtttacctgttgttgtagttgtttcttctggcttggatttctaaagctcctgaggtatagatactgttgattttacctaaagaggcttcagcagaagagaacaatcacacaagaactagaaaagacaaggaaggttttatgaggaaaatgaacattaatctagaatttgaaggaaaaatgggacccacatcagcatcatagagaaaaggggattcctggcaaggagaacatggaattttgtggaatgcacagaatgtaggaggtaggaatacatatggcatttcaaggaatgagtgtgccatacgtcagccaaaggctgaggcaatggagtactgggaggaagtgttaagaattatggatggaccagattcttactttaacatcttttttttcccctaagcctaatgtgcttccaaacttgcctcttttattaaatgatattcataacaaaagcaatactaaagtccttccttgcctgtttcctctacacacataaaaattaaacatttaaataaaagtagaaaaattgtgacacttttttaaagcttcaagagtaagatttcacatacagatgacacattttctacaatgtaaaatttagagcattactaacgcatattaaatgctagatcagtctttcaagttacagtacacagaagataaaaataggtgcgatttggaaagaacaaaggtgaactcgaagcatacagtgaataggcacaaatcagctacaaattttagcagatattcatgcgcttattgaaataagccaccttttcctgcatttgtgccgacaagtccatttatcctttttaagatgctccagtaacgataggagcattttgggggcgggggaggggggctaattgatgtgatctaatttttcagactcaggagttttggagaaaggtcagtgtaacagaaaagctgcccattagaaataacatctataaactgtcagaaaagagtgcaagccagaagatgaagcaattcagattgcttcccttcttttccaaggttcttgggaaaaaaatttcattacgcataagaagtatagctaaatacttaactgaagttaaaacaaaatcatgttttctaacagttcaggtgaatttcaagccatccaggccacaagataatgatgtcctccaagtctgacctacagggaacttttcttctaattaataaacagactacagcaagaaaattaatttatgcaccgcatttacttgttgatgcccttcgagagcataacatttcagtaggcactgtgtacacgagatacagcagaagaatacgtcaaagctagttctttggtgttttttttttcccagagaaaatagaggtaatccaacattagacagaatttgtcgagattactagatgtacattcaaaacatccattcaacaaaccaattgaattagttgcatataagagtgtcccctctgggccgggtgcagtggctcacgcctgtaatcccagcactttgggaggctgaggtgggtggatcacgaggtcaggagatcgagacaatcgtggctgacacggtgaaaccccgtctctactaaaaatacaaaaaattagctgggcgcggtggcgggcgcccatagtcccagctactcgggaggctgaggcaggagaacggtgtgaaaccgggaggcggagcttgcagtgagcggagatcgcaccactgcactctagcctgggcgaaagagcgagactccgactcagaaaaaaaaaaaaaaaaaaaaaaagagtgtcccctctgaattgtactcttcaggattccctgggtgcctttttaaaatttaagtctgctactgcctctttcataacttatggggcagagccctaattccttagcatgtcatgagaacttccaaatccaggttctgcctgcttattcaatctggttccactctcatgccagccacttcatacctaatcctccaccattgctaccgccagtgtctgaatgcatctcacctgcgtgcattttaccaagattctcccactgcctggaatgagaccacacctttttcaccctgaaacacagccattccaattgtggaaactcaactcaggcacctgttccttcccgtcttaccacatttcctgaccaactcatgccaccattgaatggccccttaagcttaagtcctcttatttttgcagtgattagacgaaatactatatgtaaattatttagcaccatgtctgacagtagtaaataactatcattatatcacatgttattataactacactggagagacaatataacatggtggctaaatgagtaaaacttgacatcatactgcctatctttcagtacttattgttctgtgaatttgtcaagttaatgggccctcccttctgggtcagttttcttacctgcaaaatgggtacaataatagtttctacctcacggggcgtttgtaagagttgaatgagttagcacagaaaaagcacttagtgtctaccacatactaagtatgcaataaatgttaactgtgctgctgctgatgatgtactttttaaacactttaataaaaaatttcaaatatatgcaaaattagagacagtggtatgcatatactgaacacccagctttagcaattatcaaattttgccattattgtttatttatctatttctctttggtctatttttcattaatgtagtattttaaagcaaattccagacattatcatcagtttccctttaaatkcttctctaaacaatgatgactttctacatagaaccacagttccttttacatccctatcttgcaaatacgtctaaataggatatttcatttaacttacttattttcctatctttccttctgggctgtaaatccttgaaaccagtggttgtgatatttaattcatttaagctgtaattcactggctagaacacggtagtagtgcaataaatgtactttttaaagagagagagggaagtaaaaaagagagaagggagagagttaaggagagagggaataggaagggctcacataacaaaataagacattaaacaaatgttgaccttaraataggcatagtacaactagtgcctgaataagcagtaagtaccaaatgctgtgatcctagagaggtgtctcagaaacctatgcatagccaagtttaatttgccagcaggtttttacttcattgactggtcaggtagagaagaagaaagcaaaaataaaagagtgtattattctgtatcacaatggtatcagattgtttattttggagtctgtgtctatttctcatttccaataatttatgatatcatttaccattattaaaggaaccttatttttaaagccctgtgacacctagtgtgaagcagaagagtttgcaaagtttaaacatsatattgttaaattctggagtggctttaactagctgtgtgatcttgggcaagttacttgctttctctgcttcagttcttcatttttaaagtgtgacaggattagcacctatctcataggcatgacatgcttagaacaatacctgatacatgaaaagaatttttaaaattttatttattatctagttataagagaacaatgaaataaaacaaatatgaagctcgcccatttaaagaaaaaaaaaagaatgatttcattgaagatacttcctctgccatggaattgctaaatgaaactttgcagcaattccaaaataacttgccccagggagtaggattggattttgctaaactgaggatttaagatttacaattttttgactgtaattcattcttacctctgccaaatgtgattgcaaagggaaagaagacatcataattgtacgaaagggttttaaccaggttttyttgttttttgtttgtttgtttttactaattgtttcagggcatttgaggcaattgtaagagcttacacatggtaaccactacataaatattaaaatgatggcttggtacaaaaatgactttatgattaataaaatcacaaaaacttggaaaaagagttataaaaattctccataattgagtgccaactttgggcctaatgttttatatagtaggtagaacccaataactgccaattatttggcagttttgatgttagaaaaggccacgggataaagttcggacaaaatacattttttctattcctccagatagtagggttctcatttttcacagaggaaattagggtttagatagataggggacttgtataaaccacatgctacaaagcgaccatgtagaaacgtgagcccaggttttcaggctcatcttattagtggctaattccaatgtcctttgcatatttaggaaatgtttgctataataaagaagctgggcaataagatattaaatattttgaaaagggtaaatatttagtgatttatcaaaggaagcacaaagcactgagtactttagcagaagaaatggattaaagatgtgagacccatgtcacataaaccaaagaccatttctcctccagataataatgagattgtcacatctatcaatttctatgtatgtattccattgtacatcctctctccctaaattttaaaaagttatgatcatgttgatatgcaaagggaayttatgtgtttgtttaactttttgaggagaaagtgagaaagagaaaatattttacattccaggagagaagcactttagagaaattgaagcaaaaactgggaagaagtcagggccaactggtggaaagtcccccaggatgcaagagaggagcactgagccctgacctacttctcactaattgctgcaaacctcccataaattccttgcccttcctggtcttcagattcctcttctataaaacaagatggctggggaaagactctctgaggtttcttggagtttttacaatttaccgatcttgtgaaattagaccattaattatcttttaaatgtatgttttacaaagtgttaagatggaagaaataaactggtaaaatataagatggtttgtaatcataaatattttccatatttaattatagtttatttctcatagaagtgtaaattgaggtgggttacagtgttaaaacaatattagaccagtttgaaaaaaaaaagctagaaagttctatgcacttacatattttgtgataatcagatattagtcaccattctttatataaacccaatgttactaattacttaagctttaagatgaatgccaacattttgatttattcacatccataacataatttggagaacctagaaatttttttgtttttacatttgtgcaatgacatttcaggtttggttttagacttccttcttttctttcaacatgatgctgagaaacacaagtaataggataatcacaggttcattcctagccatcgcttttgcctgtcaatatcctaattacttccctactccacttagatgactcagagtccatgccatgaatactgatgatgagagatgatgcaatggggagaacttattgtagctccatcctgtcctttaactttcattgtttctccagccaagaatttaagggcacaagttagaggagagtctggtcatcaaaataaaattcgttagccttttaaaatatgtcaggctaataggacaagcagcctgcaaggagaagcatccctgactttgctggacagcatttccaattatcagcatcttctggcattttaagttataactgaatattctcaaataaatgttgcaagaatatgaagtgtagcataagtattatcttttcagtgaaatctattcttatttatttacatagagtgtattctattttaaattatatatttatggacataaaattcacatatttgacaagttttttgaagaggcttttccactggagtaaaaagatggaaatttttaaacagcatttgattggtattccattttcctttaatatttgaaaatgttatgttgatcatattttaggtaggaatggatctattaactaccatggaatcaatttgtagttatccatgaaaataaaacaggaagaatttttaaataaatattcactctttatttacaaagatttattaagtctctgctatgtgccagtcctagagaaataaactagtgatggcctggatcgtttaggagcttacaatgttttgggagacatgcacatagaatgwttaaacgaatcaggagatggtgagttccacagctgatgtatacacaaacaaataatgggtgcatgaaagagggtcaccttatctcttctgataaggttatgaaggtatcccagaagaaaaacatctgagctkagtcttaaaaatgcaagagaatattcccagatgaagaaaggggagcaggccatctcaagcagaggagacatcagttgattttcagcaagtatgtagagtgtttaaggactgattgacaggtcaacgtggcccaagtgaaaatggtgaaagttagttggacccaactgtgcaggtcgtgaagtcagattgtgaggatggctcccatctcatctgggagaaagagatggcttcctcaggcatcaagtgctttcttcttaaagctgcagttatttcaccgctatttaaatttgtgttttcccratggtcagagactacagtcagactgcctcttggatttcagtgatctttgatttacctgtttacacctttcacatatttgttgttgtttgcattttgacttgtagaagctctttacaaacatgagtagtsatcctttgtcatttttgttgtgctcatactcccacggtactttgctagttttgttattttgtctatgattttaccccatacacaaggtttattttataagtttagctaacaaatacttattatgtaccaagttttattctaatgtttttttacaaatgttaacacatttaatcttcataacaatcctatggggaaggtattaacatgcctatgttacaggtaagaaaactgagctacatcttgaaggtcacataacttcccaaggccttactgtggtaggtgtgaggccagggaatgctacaaagccctgctttgagcctccactaagctgctttctttcaaatttgtcttctgttcctttatgatacctgtattttatatcttattaaacaaggccttgcccagctcagattataaaataacctcctagacattcttataattttatacttctgtgacttttgggtttagaactttaatcaatctgcaatgtattcttgtgcatgatttgagttagaaaccttctcaaatgttacattatttattgcagtaaccactgtttctctcatttatttgaaatgataaattattgcaaaatagattcatgcattttttgtaacttttttattatatttcactgttcaatttgttcattccttcactaataccatacattgctctaattactgttactttttagcattgaaattgatgtttaagtgttccctttttaaaatatacttgtcactgttctcatttatttataaattcctccaaataaatatatacaattagtgtcttacattttataaagttggtttgttttggtggagtagattaaatattgacttgggatgcaatatacttataaaattaatttgaagaaaactgatattgtcaaaataattaactttttcatactagaatatagggtgtcttttcatttattaaggtctttcttgtatttcactacatttttagtttttttcttaagtcttacacaatgtttggtaagcttatttctaagtattttatcattgttttccacttttaatgagatttcaaattccattaaaatttttaattggatcctgctgatatmcagaaaaactattaatgtttgcatgtctttcatgtatataattgctatattaaattatcttattaattctaktagtttttcaattagttatcttggaatttttcttagtcatatccgtgaaaattgttagctttatctcttcttttgcaatgtttacactttttaattatattgtctcattgtggatatgtacttataatgaaaactattcgtgataatattcttaattttctagttcctggttttaattgaaattctttgtatatttcaccagttagattgttcttacacagtagtttgatttttattcctagactagttattccattctcacatttaaatgacactttcgctgctttaggttctcaatcttttgtctcagaactttctagcatcttgtgtttcagggaaggctgaggccaatctgagagttattccattgtgctaccttccttggttttaaaaattatcttcattcttgaaattcaaagattttacccaaatttcacctaaatgtgtatagatttggagttaagttttccagagaaaataccagacactcagttaaattaaagttcagataaataacaaataaaaactatttcccagctgtatgcatttttatttgctcaatctgataatcctaatggggtattgactgttaatatattattatcattattaattatttttgttactgtttggcagtcaaagggatattttaaaataaagtcctttttcagatcagaccaatatttttcaattacttctttgacacagcgtagcaggtcagaaaactggttcttaaaaccattgtgtatattggatgtggtcttacatttaactcccggacaagctgtttataatttggtagtatgtcttaggctcttagatgctcacatgctagaataagacaaaaagaattaggccattcctttttctctttattccctgttctttctatctggaaaaacagatattggaaattcttcatctattccctatgtctcataacttttctattaaatgtatatatttttgtcttttatgcctcatgttttgggagtttatcttcacccacattaattttaatatgtatgcctgatgaatttattaaaaatttctacttttaatgagattgcaaattccaataaaatttctaattgtatcttgctgwtatatagaaaaactattaatgtttgcatgtctgtcttgtatataattgctatattaaattattttattaattctagtggttttttaattagttttcttgggaatttttcttagtcatatctatgaaaactgataattttatctcttcttttgcaaagtttatacattttaattatattgtctcattatggatatgtacttataaaacaatttgtgataatattcttaattttaaattaagaatctttttaatatcttaaccttacatgtataaatttattaggtctgataattttattattagaccttcactaaaatgttaaaktttagctatcatggttttaatttcaaaattttttttcttgatcttaggttatttctttttcatagcaatttgttcttgctttatgacttttgagtttttttctgttttagcattatcatggtttcctctaagactgatcaactttctccttttacataagcatatttgttgattttcctcaaatatctggtgaaacttgatttccattcttatgttattaatatttataaatgaagtatcggtttatcaatgtaggtaactacagtggttttaacaattgttatgaaaggctggttttgcagcaggcttcttccctgactaggagagagaaatgtgtgggtctggttttccttttcttgttatgcaagcaggaagaaccagaaaagcaggggcactctcatgattgcaaaagcaagtgctcatctgggtggtacttttaagtgctttggcaaaggatgaggtaaaattmaaagacaacagcatcactgttttcagaacttcattcagagccattacgacaaataatttggttgcaagggtgtttgatacctgaaataacataaggattcttagcactctcgttgtctgttcacaattgtctgcaaaaagcaaggcaaagcatagaggtcatgcatggtgttatttttcatttgtgggaggagaatacatgttcttattttgatattaaaattargaaagactagtggtcaaaattgaaagtatagagctttactgtgacataattcagtttcttataaggggatcatatataagagtaccccaaagtactttgtattgtgcttgcaacttttctgtaagttaaaattatttaataaaaaaggatttttttataatcaagaaatctaaagatggaaaattatgattagatttaggtttaacttaaagtgacagaaaacacaaaatattactgtttcaaataagatagaatttatatcttgcctacataatgtaagcggtcatccaagcctggaatggtgctccttggtgtcaggaacttgagttcattctgtcttgcagcctctccatgcaggaattccatgttcagggtcatcccgtggtctaagacaaatgctggaatttcagcatttccattcacattccagccagcaggaaggagaagaygattgccaaaaaagtgcactcctttcctctaggaacactttctaaaagttttactttcttcctgcatcccagtgtctaggaactggtcacataaccatatctagctacaaggaaaactaataaatacaaaagctgctaattacttctcagcattcctgtacctactaaaaatcataattattgtagaaattggatattgaagacaacgaagaaaacaatgaagagtatttgccacaccgtttgaacagggcagtgtttgtagaatctcktgaagctcatccattccaaagacatccgtgagtgcttaccatgcacgaagcactgtgctggggcttgagatagaaatgttgagaacaacacacttggtctctgtgctaatggagttttaggctaatgggaaaagtggggattcaaaacataaggaaacatatttgaatattaataaaagctaagagactgttaagagggaaattatcacatgttctgaraatgtgtcacggaaggactttgccaagccagggcaggatgatgatratctaagaaggctttcctgagggcatgatacatgtgttcaaatccacaggatgaatgggaatatgcaaaggagaggctagagtaggaatatcaaagaaggcagcatatgcacaaatgtcacagggaaaagaataataatccagttaagaaactgaaagttctttatggctggagtacagcaaacaaggaggaaaacaggagaaaatgagactagaaaggttctcaaggttaaaataatgtagaatcaaatgcaggccacatacagttatttgtgtcattaaagggttagaggcagagagcaacatgacctgttttatacattgaaaaatgttctgaatgcaatgtagaaaacaactggatgagtgtaagaggagactatgctaggagttcaggcaaggtgggagagagagcaatgtggacagaatcaagagatattcaagagattaaaaacaatagaacctgatgataatttagatacgaaagagtgaaggtaagagaggagttgaaggtgattcccacatttccagattgtacaaatggatgggtggtggaccatttattttctgaaacagagaaatatcaactaccaattagaggaaagatgttgatttttggtttgatttaagagccttgagtttgcggtgcctttctgacgttcaagtaggcatttcagataggaagttaaacatgcaaatctggaacaccgagaaaatagcaagcctagagatacagatttgagaggtttttgcacataggtagttggtaactaaatcacagtttcagagaggagyccctacagagatagcaggcagagagatgagaaaaaacaagaatctgggacttgaatctaaaaggcaggcagaagaaggktggcagaaggcagcaatggagactgaggagggtgggtgagaaggtagggatctgttgggagtttgtactatgatagaagccgagggattctaaagcactaaacaggcaaattcctccttgacttgacttgacttccttccttaagtcaaggaagaggagggctgaaagaaaaaattgagagtacagaagggttctgaaatgttactgcaaagataagatgtgacaagtatctcttaaagatggtggtagtcatgatggtggtggctgtgtctgtgtatctttgttatgcatcaatatttgaaccacttggggagatgtccgtcaaagaatacaaaatttcagtttggcaggaggaataagttcaagagatctattgtacatcatggatgcttagtaacaatatattatacacttgaaaaatttctaagagtagatcctaagtgttcccaccacacacaaaaaaagtgtgtgaggtaatgcaatgttaattagcttgatttaaccattccacaatatacacatatatcaaaaaattatgttgtacggtataaatatatacaattttgtcaattaaaagtaaatgaatgaatgaatgaattaaaatatttggagcactctgaagctgaattcagaaataatgctaaagaagacttgactttgttaaagacagaatttttatrgaatatatggaaatagtaattattgcttaaaaactgtattcaatattttgatattgacctcaataaaaaaatgtgtaatcaatttttgaacttctagtcactcaggggacagaatggttaccatttgttgtcctaaagcaagggtagcataggggcttgtcccaggaacaatcagttggtcttcaaccaaaaaagtggatatttccatcagggacatttgcctggacaccaccatgttagattctaaaaatcaaacatgtgtcccaccctaactttgcctttagtccctgaaagaatggacstaggtttgagagaggagaacagtgagggtcatccctcttcatctcaggagcaattaactagttattttgctcactttgggaagaatttgccttcaaaaattataccttttggaaaactataccatataattatttatcttccttcaaaatatgaattatttgatctttttctcacttcaacttttcaaaaatttcacataaggagccctattcaattatctccttctgtaattaaaacattttagtaggtgtgcaaccaaattgccaaactaagacagatcttgttattttaaaagaacattataatttcaattrttctaataattgttattattcgatagagcaaattatgaatgcaattttcaaarcaaatgaaaacataagaaattcatgatttttctatactgctacaaatttggataacttcraagtgattatcttacatttggcttttactttggaaaatattaatattagaaaaactgcaaaattttggaatctagattaaagaacgatagattatgatgataactgtttatgattcttattttattatttcttttttgaacctgcttttccaatctagataagcatgtctagtctcataccatattcatactgcatattataacatggtgttaataatcttaagtaatattccatggccaatcaaccttttttggacactaatactcattatgagactgagcttaacagctgttttttgtttttgtttttgcttttttagcatttaagtttaggggtatgtgtgcaggttggttatataaatacactcatgtcatgggggtttattgtacagattatttcatcatccaggtattataatcctagtacccatttgttatttttcctgatcctcttcctcctctcacccaccaccctgatgtagggcccagtgtccattgttcccctctatgtgtccatgtgttctcataatttagcccccacttgtaagtgagaacatgcagtatttggttttccattcctgcaatagtttgctaaggataatggcctccagctccatgcatgtccctgcaaaggacatgattgcattattttttactgctgcatagtattctatgatgtatatataacgcattttctttatccagtctactgctgatgggcatttaggttgattgtatgtctttgctactgtcaatagtgctgcaatgaatatatatgtgcatgtgtcttcatgatagaacaatttatattcctttgggtatatacccagtaatgggattgtggagtcaagtggtagttctattttcagctgttttaggaattgccacagtgtcttccacaatgattgaattaatttacacccccaccatcaatgtataagtattcccttttctccgcaaccttgccagtatctgttattttgtgacttttgaatcatagccttctgactggtgtgagacggcatctcattgtggttttgatttgcatttctctaataatcagtgatgctgagcttttttcatatgcttgttggcctaatgcatgtcttctatagaaaagtgtttgctcatgttctttgcccagtttttaatgtggttgtttattttttgcttgtaaatttaagttccttataggtgctggatattagatctttgtcagatacacagtttgcaaaattttcctcccattctgtaggttgtcagtttactctgttgatagttttcatttgtttgtttttgttgttgttgttgttgttattgtttttgctgtgcagacactctttagtttaattagatcccaattgttaatttttgcttttgtcacaattatttttgatgtcttcaccatgaaatctttgcctattccaatatccaggatggtactgcctaggttgtctttcagggtttttacagtttggggctttttttttttttttttttctgaggtggagtctcactctgtcgcccaggctggagtgcagtggtgccgatctcagctcactgcaacctctgcctcctgggttcaaacaattctcctgcctcagcctcctgagtagctggaactacaagtgtgtgccaccatgctcggctaactttttgtatttgtatttttttagtagagacagggtttcaccgtgttagccaggatggtcttgatctcctgacctcatgatccgcccgccttggcctcccaaagtgctgggattacaggcgacagccaccatgcccagccagttttaggctttacatttaagtctttaatccatcttgagttgatttttgtacacagtgaaggaaagggtccagtttcaatcttctgcatatggctagccagttattccaacaccatttattgaatagggagtcttttcctcattgcttgtttttgtcagctttgttgaagatcagatggatgtaggtgtgtgatgttatttctgggctctctattctgttcctttggtttacatatctgtttttgtaccaataccatgctgctttggttattgtagcctgcagtatagtttgaaattgggtagcgtgatgcctccagctttgttctttttgcttaggattgccttggctattcagactctttttttattctatatgaattttaaaatagtttttttctagttctgtgaaaaatgccgttggtagttagcagcttgtttttgtttgttcatttgtttttgaaacagaatgttggtctgtgccttaagtttgaaaatcctccaaaattttctgtcctttcactgaatatgtggtctcttggtcacaatgcagcactgaattccctgttaatatgcatatcttgggttctttttattcagtacacacagaggttgttcccttgaaaatgagtagtccagtaaaatgccctttgcagagttatatcccatatttctagaaataaattctaccaaatattagcactactgaataacacttttaacaatgtttaaacttgcctttttagttgaaagcaaacataaactcagctgtaatatcttaagttcaaatgcactaattttcaatttcatatcaaatttcaaaatacttttaggtttctattcaacactttggttttcatacacaagccacagagtatactaaaactcatttgggtggcatgtttctcatataagtaaaggtaaagactaaggacaagtaagttctttattttctaccagggtgaatggtaaagtagtaaagatcagtatttcctggaaaaggggaaaattgctttcagcaggagtttacaaatccacttggccattaaacatttttcacagatgacatcaaaagtgttattcacataaatgcatgggaatttttttccaatgtatgtaggtgttattatgttaaataaaacacagacccacttaaacatcatttaatttatggtaggcttttcaacaagctggccagatttggttgatgtttctcaaaaactactaaaatttcaataaagtgaatgtctgtgaagtgctttgaaatttaaaagagctgttgaatgtgtgcaaagatttagctatagggatgttcaatgaatcactgattatcacaaagaaaatgtggaacaacctaaatatgcaataataggagtttgattaaatacattatactatatccataataattttgcccttttggttgcaagaatcacagatacagtcagacaatttcagaataataggtgcttttgcaaagaagcattagcatctctgctgcagggcgtagtcctaactcctacccttctcctctcaaggtggtttattggtataatttttaaagacaccagtgccccctgtttttccctaacttagcagagaagatctgacaaacctattcagtcactatcatgtatgaagcatctctcatattcataaagtgtgggcaagaggctggtatagggtaatagactttcccaactataataggataagagtgattgtagctatcaaaaatatgacagatctttcaaaagtatgtgaaattattaatttaatgatgacccgtaagtcatgattttatactatttggcatagcttcacaaaacacaattttcatatgtattgaaaactaaagcaaaggaaaagtataaaaatttttgtgtaactgaactgacatgatatcagtcataaaatctctgcttgacaatctcatctgtcattctttcaaaaataacttatttattaatgtcaacagtgatgctgctttgcactgtattgaatataaatctgttgttcttttggcatttgggctaaggttggctaaattatcttagtaaataaattagcaaagcacctttttttttttctttttggcaatctctctctataattcctctttacctgtatcagtttttctcttttcctcatatttctcaaatatatatcaccattggttcttctttctcttgattgagaatttctgagaaatgttggtccatagtaaccagtattccaaggttagatgaaataaccaggacttagtgagaaatgattgttcagtaccatggatagcagaacacttatttccccaaatactaacacatactcctccaaattttagctgcaccattgaaaacatttctttcaacatgtctttggctcaggctattattttcaggccaagaagttctagtcagactagccaggctggctatactttttaaactatctgtggcaaaggatcaagatttttcccaccactcgatctaccgtgtaccaatatgttcatcatggaaactgaacaacctgctcctgawtgactactggatacataacgaaatgaaggcagaaataaagatgttctttgaaaccaacaagaacaaagacacaacataccagaatctttgggacacattcaaagcagtgtgtagagggaaatttatagcactacatgcccacaagagaaagcaggaaagatctaaaactgacaccctaacatcacaattaaaagaactagagaagcaagagcaaacacattcaaaagctagcagaaggcaagaaataactaagatcagagcataactgaaggaaatagagacacagaaaaacctccaaaaaataaatttataaaaagttaaagcaaacacacaaaatacaagtagtaatttcttttttattattacataaaaaacaaacataatatagtctgccaaaattgctgtgacagttttaaacagccctgtgatggcatccagttgataaaagtgagtagagccccagtatgtgagagaggcagagagtttccctctgtgacttacctttccactggagatccaagcaacccaggccaagagagagcactttgcttctcctaatccctggagttagcttagggagagtcttggagaaactgtgaaggaaagacaccaggaaaagtggcagaagttttctcagaccctggatgagagtaggatgccattttaaatctgggtgcatacaaagtcagccatgctttggtgccctagcaccatggctacagaggcactttagtcttgtgccagagattgaagcatcttatctggagtggggtgggggcctccacagccagaactgtaaaaaagtgtctcagcagtagtctctggaattgtgctctctcccatcacaggcaggaggagagctgctacagttgcggtttcttctgagcagcaagacttgcagccagggccagcttggcaatctggaactgatctgtgtgtgccattgctgagtgccccatcctcctcccctgagatcgtggtgcaacagagccctccctgctccattcctaggcagaaatctgggtatttggaacacctgcttgcctggaccggtggtctgagccacaccacccttccttgatgtatatggtggtacagagagggtctctgtgctccatgcccaagcagatttctaggcattcagagcrctcattcacctggttcagcagcctgagccacctaccctccttgtgcaaagactggtacagagggaccctctctgctacatgcccaggaagatctccaggcattcagagcgcctgcttgcttagttcagcagccagagtcaccccacccctcatgtgcagagatctttgtgcagcggggctctctctgctccacacccaagaagatctctagacttttggggcattgctcaccaggaccaccaagactgtccaaagatcttggtgcaaggaatccctctctgttcacactcaggcagatcaccagacattctgagcatacagtcatctggttcagcagcctgagctgccccaccatttatggacatagatcatggtatagtaagaccctttctgctccatgctcaggcaaatctccaggcatttagaatacctgcttgcctggtgtggcaacctgggttgcacaaccccttctgttcgtagatattggtgcaggaaggccctctctgctccacacccaggaagatctgcaggcatctgaagcacccactctcctggattaggaacctggaacacagaacttggagcaaaggtggtttcctgactccacatttagacacacttctgggtgcctggtagccacccactggattctcacttgatactggtgcttgtgcytgcatcaggggacctccaggcagacctgcccaactggtcccaccctttatggctcctacccccacagtgctgagcagggacctcagaccaatgtgtattctatgaatcaacccattgcctgggcaacagagaacttccacttctaaatacagataccagccactttgaccacagctggctgttatctacaggcttgtaggacaaacttcacagcccaatataaaacctgttgaaagaagtgcatactgctatagaagaaaaactgaaagaccctcctcagcattcttcacagtcacaccccataaagcacgtaagggaaagagaataatagtaatgacattataaggaaagaaagataaaggaaaagtcctacctgtatgaaaaaaaatacaaaaattagaagtgccagtgtctccaggtgagaagcaaccagcacaagaattctagcaccatgaaaaaacctgaatgtagtgaaaccaccaaaagattgagctacctctccagcaatggtccctagccaaaatggaaactcagaaataataaataaaaattcaaagcgtggattgcaaggaagctcattcagatccaagacaaggttgaaaatcaacaaaaggaaatttctaaagcaacccaggaaatgaacaaaaagataaacatcttaaaaagaaatcaatcagagcttctggaattgaaaaactcacgtaaagaattccaaaatacaaatgaaatctttatcaatagactgaaccaagcagaagaaagaatttcagagattgaagagtggtcttttgaactaacccaatatggcaaaaataaatatgaagaattttaaaaatgagcagtcctcatgaaatatgggattatgtaagaggactaaatgtatgaattattggcattcctgagagagaaggaaaaaaacaaacaacctggaaaatatagttgaaagaataattcaagtaacatgcctaatctagctaggaagatagatgtccagatacaagacattcagagaatacctgtgagatactatgcaaaacaaatatcaagccatgtagactacaaaccatgtagtcaccagattgagcaaggtcaacgctaaagaaaaaatcttaaagactgctagaggttttccttaggcaaagatcttaagatctttccttaggtaaagatcttaaagatctgctagaggacagatcatgtacaaagagaaccccatcaggctaatagaggacttatcaccagaaaccttacaagccaggagagactgggggcctattttcagcattcttaaagaaaagaaattccaaccaagaattctatatctcaacaaaggtttataagtgaaagataaataaaatattttccagacaaacaagtcctaggggaattcattaccactagaccagccttaagagagatccttaarggagttctaaacatggaaatgaaagaacgatacctgtaaccgcaaaaacacacttaagtacatagcctgcagaccatataaagcaactacacaatagaaactacaaagcaaccagctaacaacctcatggtaggatcaaagcctcacttatcaatattaaccttaaattttaatggtctcaatgcacgacctaaaagacacagagctgcaaggttgataaaaatacaagactcacttcttatccaagaaaacaccaaatagcagatgacgctggtggagcgagggggcccggaggactcgggggccctgggatggggaaccacagtggctttcgtggaggttttggcagtggyatctgggctgtggtcacagccatgracagagctggggctgaggccacggagctcactgaggcaaggccgaggatgagtggatgcccrtcaccgagctggacctcctagtcaaggacatgaagatcaagtccctggaggagatctacctcttctccctgcccatcaaagaatcagatatcattgactttttcttgggggcctctctcaagaacaaggatttgaagattatgatggtgcagaagcagacccacgtcggccagcacaccaagttcaaggtgtttgttgccattggggactacaatggccacatyggtctgggtgttaagtgctccaaggaggtggccactgccatctgcggggccatcatcctgrccaagctctccattgtcccygtgtgcagaggctacaggggtaacaagatctgcaagccccacactgtcccttgcaaggtgacagaccgctgcagctctgtgctggtgcacctcatccctgagtccaggaacattggcatcatctcagcccctgtgcccaagaagctgctcatgatggctggtatcaatgactgctacaccttagccaggggctgcactgccaccctgggcaacttttccaaggccacctttgatgccatctctaagacctacagctacctgacccccaacctccggaaggagactgtattcaccatgtctccctatcaggaattcactgagcacttcttcaagacccacaccagagtctccatgcagaggactgaggctccagctgtggctacaacataggatttttatacaagaaaaataaagtgaattaagcctgaaaaaaaaatacaaggctcatcagtctgctgtgttcatgaaacccatcttacgtgtaaagacacccacaggctcaaagtacagggttggagaaagatctaccatgcaaacagagaagaaataaaagcagcggtcacagcccaggtgctgtggctcacacctctaatcccagcactttgggaggccaaggcaggcagatcacttgagcccaagatttcaaaacaagcctggacaacataggaaggccccatcctttaaataataaacaaaaaagcaggggtcactattcttctatctgataaaacatactttaagccaacaacagtaaaaaaaagacaaagaaggccattacgtaatgataaagggttcaattcaacaagaagtcttgactctcataaatatgtatgcatcaactttggagcaaccagatttataagcctgctaaaagacttagacagccacacaataatggtaggggtcttcaacccccaactgacagcagtagacaggtcatgaaggcagcaaactaacaaagaaactctgaacttaaactcaacacttgaccaactagacctaatgaaggtctagaaaacactcaacccacaaaccacagagtatgcattcttcttatctgcacatggaacatactccaagattgaccacatgctctaccataaagtaagtctcaatgaaataaatatcaaatcaaccatactctcaaaccacaatagaataaaaatagaaatcaataccaagaaaatctcttaaaactacacaattacatggaaagtaaataatttgatcctgaatgacttttgggtaaacaatgaaatcaaggcagaaatttaaaaattatttgaaataaatgaaaacagagacacaacataccaaaatctctgggattcagcaaaagcagtattaagaggaaagtttatagtgctaaatgcttacctcaaagagttagaaagatctcaaattaacgatctaatatcacatctagaggaactagaaaaacaagaacaaactaaccccaaagttctcagaagaaaagaaagaactaaaattagggcagatattgagaatcaaattgagacccaaaaattcatacaaagtatcaacaaaactaaaagttggttctttgaaaggataaacaagatcaatacactagattaacaaagaaaagaagagagaagatccaaataagcacaatcagaaatgacaaagaatgacattacaactgatcccaccaaaatacagaaaatccttggagaccattatgaacctctctacacacaaaaactagaaaatctagaggaaatgataaattctgggaaacacacaatttcccatgattaaatcaagaagaaattgaaacattgaacagaccaacatcaagttctgaaattgaatcagtaataaaataaaaactaccaaccaataaaagccccagacmagagggatttacagccaaattctaccagatgtacaaaaagctggtaccaattttactgcacctatttcaaaaaatcaagaagggagtcccttctaacacattctacaaagccagcatcaggccaataccaaaacctggcaaagacacaatgaaaaaaagaaaattgcaggccaacattcctgatgaacatagatgcaaaaatcttcaacaaaatgctagcatactgaattcagaaacacatcaaaaagctaattcaccatgatcaagtagacttcattcctggaatgcaaggctgattcaatgtacacaaatcaataaatgtgactcaccacataaagaattaaaaacaaaaacaatatgattatctcagacacagggaaagcttttgataaaatccaacaattttttgtgataaaaaccctcaagaaactaggcatcaaaggaacatacttcaaaataataaaagcaatctatgacaaacccacagtcagcatcatactgaatgggcaaaaattggaatcattccccttgagaaatggaacaaaacaaggatgcccactctcaccactcctattcaacatagtaytggaattggtagccagagcaatcaggcaacagaaagaaataaaaggcaaccaaataggaaaagaagtcaaactatctctcttcatggacaatatgattctatacattgacaaccctaaagactccaccaaaagcctcttggaactgataaatgacttcagcgaagtttcaggatacaaaatcaatgtacaaaaattagtagcagttttatacaccaatagcattcaagctgagggccaaaacaaaaatgcaatccgatttacaatagccacacacacaaaaaaatacctggaagtacatctaaacaaaagaagaactacaaaacactgcaaaaagaaatcagatgacacacacaaatgaaaaaacattccatgctcatagattagaagaatcaatatcattaaattggccatgctgcccaaagcaatctacacttttaatactactcctatcaagctaccaacatcatttttcacagagctagaaaaaaaactattctaaaatttatacagaccaaaaaagagcccaaatagtctaagcaatcctaaaaagaaagaacaaagccagaggcatcacattacacaacttcaaactacactatatgctacagtaccaaaacagcatggtactcttacgaaaagagacacgtagaccaatggaacagaatagagaacccataaataaagcctatgccatctgatgtgtagaacacctaaagccatctgatctttgacaaagttgacaaaaataagcaacagggaaataattgcctattcagcaataaataggactgggatagctttccagccatatgcagaagaatgaaactggatcccatatactacaattaactgtatacaaaaattaactgaaaattgattaaaaatttaaacataagacttcaaactataagaattctagaagaaaacctaggaaacaccaatctggacatcggcctggggaaagtattgatgactaaattctcaaaagcaattttaacaaaaacaaaaaatgacaagtggacctaattaaactaaagagcttctgcacaccgaaagaaactatcaacagagtaaacagacaacctaaagacagggagaaaatgttcacaaactgcacctgacaaaggtctaatatctagaattcacatgaaacttaaacaattgaacaagcaaaaaacaaataatcccattaaaaataggcaaaatacatgaacagacacgcctcaaaagaagacacacaagaaacatgaaaagatgctcatcatcactaatcatcagagaaacgcaaaacaaaaccacaatgagatagcatctcacaccagtcagaacggctgtgactaaaacatcagtaaacaacagatgttggcgaggctgtggagaaaagggaatgttcctacactgttggtgggaatgtaaatcagctctgccaatacagaaagtagttttgagatttctcaaagaagttaaaacagaagtgtcatttgaccatgcagtctcattaatgagtatatatcaaaaaaaaaaaaaattctaccaaaaagacacatgtactcacatgttcatcacagcactatttgtgataacaacatcaaggaatcaacctaggggcctatcagcagtggaatggataaagaaaatatggcacatatagactatggaatactatgcagccatagaagagaacaaaattatgtccttttctgcaacatggatgcagctgaaggccattatcctaagcaaattaacacaggaacagaaaaccaagtcctgaccattctcacttataagtggcagataaacatccagtactcacggacataaagatggcaacaacagacaatggggactactcaaggggagagggagagggtggggcaaggtttgaaaaactaactgttggctactgtgattaatacctaggtawtgggatcatttgtatcccaaacctcagcatcacacaatatatccagataacaaacctgtgtatgtacccccaaatcaaaactaaaaattgaaaaagaaaaaaaaagttttaaaggcaaatcctccattgatatacttactttgttacatataacgccatagacaatttattcccctcccccgcccaaatttgtttgccgaaacgtaatccccaatgtgacaatatttgaaggtaaagccttcaggaggttatttgttcccttataaaggaggccccagagagatcctcctcccctcccaccatgtgatgacacagcaaaatgatgaccatctataaaccatcatgcaccaaatctaatagtgccttgatctttgacttcccagctcccagagctgtgaaagataaatttctgttgtttataagctatctagtccatgttttttttatagctggctgaacaaactataatagatgacttataagtagttttcacactggccttattccacagaccagtctttgaatagtaatgactaaaaaaattaggactttttgtctctcaatgggttctataattagcaaccacaataatgtttcaagtacccaaaaaatgtcatataatgcaatcacttaaaatgaatataagcaaagaatatttactgatgtgctgagtttcttccatacattaatgggaaaaagcatattagaaaacagtatgatcccacttttattaaagaacaagagcaggtttaaagagtcagaaagtataatagtggttacttctgggtaatggacttataaggattttttttcctttgttgtttatgtttcattagctatatatgctaattttgtacagtggtcatatatttcttttatctaaatattaggactcattgaaatggattactattttaaaattgattattcattcaatatttttatatttcaatctagggtctgttactgagtccctaagtgcttttataaatggctggataggcacctctgtaaataaagtacgtagccttagaggctgaaacaatgtaagtgcacaggaaacatttattgtaagaaaatgaaagragtgaagttctttggttcttatttttaaagcattatgtgtcaaaaatgtatttggttgagtgtcatcaatttcatgtggcctaacctaatgttaagtggagttacagctaagtaaaatgttctgtcccgctttgagttaacaatcaatcatgtgcttacactaaatggtggataatcattacttttatttattttataaaaatgtagtttggtatctccatttagaaaaaaaattacttcattaaaatgaatcaacttaaattgacatgggcttgttactctaaatttctacttgatttccttattgtaaattatcttcaataaattaatccttatctccctaggccaggtctttgacatgtctggaacaaaactcagccaaatattaaaatgggaggacagaaacagttcaactgaaacatattagcaaaatctaagttggatgaatttatgctttttaggatgcagagcactcatgaaattgacatttgtaaagcagcatttgtagcatattgattaaaaatattcaatatatggattttttaaacagtgaaccactcattactctaatgcctcattaatatggtgtcaatctattcagaacaatgcataatagcagtgcactttctcagcatgttattctattgttcaatttgaaaaacaacaacaacaacaaataatctcaagccttttccttaaatgttgggggtttgtttttcaaattatatgggttttgtggtactagaagttcaaattttactaatgtaaactacatttctctaactaaagaatcatggtcaatgtagagaaaattattattatagaagaaattgaatcagaaaaacacctttcaaaacctcctaattccctgccctgtccacaaaagagatggaaggcaaggaggtcaccacaagacactcagagcagcatttgctgcagcaactaaaataatgggagactcattccgttcttccttatttacctggaaatataagtaggaaaagatattttattttataattaaaatattttattctaatatttgctagggacaggaagatagaatagggaggaaggcaaatatatgatgcccgatggattctttggaataaaattccatagggaatgttcctagtattaggaaaaatcatttttaacatatagtaagcaagttacttgggatgtcataagtaggatagaagtcatatgaaagttataatagaagtccttttttcttagggtaaataaatataagtaggaaaagatattaatttttttatttattaaaatattttatttatataaaataaaagtaggaaaagataccctcaaaattcatctcactgtgccagcagggagccgttgaggaaaagtctattttcagtagggaagcttggaaagagctggccaagttgcaattctctcaagaaagtaacacctgcagagagcacacattactcatatttgggatactcatgacacatcatctagccccctcctccctgcatgttagcacacggtgagcacacccactttccagtgacttcttggtgttttgcttacagaagcctacattcagcatatgaatcatctagccctccgcaagaggctgcctggaaagaataaggttttagagaaccagccctatggattgatcattggttctgaccacacaactattatgacaagtgaaatagaataacaacaaacggctatgatttttgtctttgtggatggatttcatrggggggagggcagcagtagaaagtataaatgacatgaaagaaagaatattaagctccaaaattgtgcttaagtaaatctggaataaaaaactgcagcaggttcttattgctcaattccagcccatttgcagagaataaaaaggcaaagcaatgtgggtgaaaagcaaggaatttgccaccttagctttgaatactatttcatttatgagtttaactgtttccccaccagccttcactaatttcacttgatctccatcaagaaagatggagaaggttttgatgagcaaggcagcactgacaaaattagatgtaggattaaaaaagaaaaccaatccacaatgtaatgaattactaaatttaaagacaactagtgaattcctgggcaagcatgatggatgcattcaaacatagattcttgaatttgccacaatcctatgccccatagctatgacttttcaccaaaaagcaaatttttaagagccaaatttgccatcgatgtgagtgggttgcatcttatagtctttgaacaaaaaggacaattataggtacattgagttcctggttccttggaaactaatggtttcattctctgcagattgatcacgtcaaattcatcaggttcatttccaaaaataaaaatcccctgtatgagggaaattgtggatttcatgtcagtcttctcaggaaatatttattttatttcaaamtataattccagttgatctgcctagcagaaacaagtgaaattgcttctgttatcattgagatagagtgatttccattttcaaatattccaaatggcatttacttgtggtaactgtaataatagagtaatacatttacagcaatgtgatagcaatatagaactactctgaaacacatgctgtatatctcatttctttagcctataagatatcaaaatgccaaacattacatacatatgtaattctcctacttaccacattccaggtaacttgcttacactgtatgttaaaaatgattttttcctaatactaggaactttccctatggaatcttattcaaaagaatccacctggcattatatatttgccttcttctctattctatcttcctgttcctagtaaaaaaaaaaaaaaaaaaaaagcaccgattgagaaggaagtgtggtaaggaacagaaaatagcatcatctgtcttcacttacagaaaggccttgcactgtaagtattcatcagacatttgttggatgttttccataatcacctcatacctgtgaggatggctattatcaaaatgtcaagagaaaacaagtgtgcacaaggttgtggagaaaagagaaaccttgcacactgttgatgggagtgtaaattgctagagccatagggaaaaacagaatggaggcctctcaaaaaattaaaaataaaactaccatataatccagcaatcttttatctgggtatatacccaaaggaaatgaaataagcaactccaagggacgtcagctttccatgttcattgcagcactattcacaatagccaagacataaaaacaatctaagtttctgttgattgaaaaattgattaaaataattagggtactatgtatatatacaatggaacattattcatccttaaataacaacatggatgaacctggagaacaagacattatgctaagtgaaataagccagacacagaaggacaaatactatatggacttacttgtatgtggaatctgaaaaaaaaggtgaatacatatagaatattgataaaagaaaaagttaggcagaattaaatttaaagtttaattgagcaacaaacgattcgcaaatagggcatcccccagaatcacagcagattcacagagactccagcacagccacgtagtgaaagaagatttacagacaaaaaaaaaaaaaggaaatgacatacagaaatcagcagtaaggtacagaaacaactagaatggttacagcttggcatttgccttatttgaacagtttgaacacttagcagtctatgagtggctgaagtatggccactgggattggccaagactcagttattgttacaggtgcatactcctaagcttggttttcagttttgtctgacttttaagctaggttacagttcatccacatggactcatatatagaagtatggagtccttctcagaccatatttagtttgctttaacagtataatggtgcataccatggacagggaagaggaggaaatgaagagacataggtcaaagggagcaaacttgyggttatataggatgaacagaccaagagatctactgtacagtaggaggactatcattaataacattgtattgcaatactgaaaatttactgagagtagatgctcttactatagaaataaaaatatggaaagtgatggatatgttaaattgcttacctatagtaatcatttcattatggctatgtatagcaaaacctcatgttatacaccttacatttayacaatgaaaatagtattgtaccagtgttaatttcttagtttggcaaatgcaccatggtaatctaagatgttacagtagggcaaattgagtaaagaatgtacaggaactctctgtactatctttgctactcttctgtaagtctaaaattatcctaaaataaaatggttctgcccctaacaaacttttgtcatcattttcactgccccagaggatcagactaagttacctccaaggctccttttaattttaaattgacaatttatgattcaagtaaggatcacttcctgtgtgaaacattattttatttatccagctaaatacaatattgctttttcagttcccttctctttttcttgtcatgctctctatgttatacatctatgtccatgtcttatggctcctattatatttgctagttctctaagcgatgctgcatttttaacttgatatttcctacagccctatggcagtggcctgcattcaggaaattccctctaaaattgaatgaattacaaaagcaatattcctgccaatgaaaaggttttgtactatgaggaatttaccagtttttcctctcctgaatattaaagaccctctgccagaagtagcttaaggaaacgactctttcccattctctattcagatcctctccacttttggtttctagcccttcatcctgtgttggccaaaatgatttgactactttatagaaagctgtcgttttaccaagaacacaatttttaagcctttccatccataawtgtttcatttaattcttaaagtttaggccaggcatggtggctcatgcctgtaatcccagcacgttgggaggccaaggcaggcagattgtctgggctcaggatttcaagacctgctagggcaacatggtgaaactctgtctctacaaaaagtacaaaaattagctgggtgtgtcgtgtgtgccaatattcccagcaacttgggaggctggggtgggaggattgcttgagcctgagaggtyaaggccatagtgagccatgatcgcactactgcactctagcctgggtaacagagttacatgctgtctcaaaaaaaawttttttttaaataaaaaaactaccaagccagcactacaagaactgctaaaaggagctctaaatcttgaaacaaatcctcaaaatacatcaaaacagaaccccctcaaagcataagtctcacaggacctataaaacaacaataaagaaaraaaaggtattcaggcaacaaatagcacaatgaatagaatggtacctcccatctcaatactaacattgaatgtaaacagcctaaatgctccacttaaaagatacagaatggcagaatggataagaattcaccaaccaagtatctgctgccttcaagagactcacctaacacataaggactcacataaacttaaggtaaagggatggaaaaagacattccatgcaaatggacacaaaaagcaagcaggagtagctattcttatataagacaaagcaaactttaaagcaacaatgttaaaaaaaataaagagaaacattatataatgataaaaggccttgttccacaggaaagtatcacaatcctatatacatatatatatatatgcacctaacactggagctcccaaatttataaaacaattgctactagacctaagaaatgagatagacagcagcataataatggtgggagacttcaatattccactgacagcactagacaggtcattaagacagaamgtcaacaaagaaacaatggatttaaactataccctggaacaaatggacttaacaaatatttacagaacattctccccatcaaccacagaatatgcattctactcatcagcacatggaacattctccaagatagaccagatgataggccacaaaacaagtctcaataaatttaagaaaaytgaaattatatcaagcactctctcagaccacaatggaataaaattggaaatcaactccaaaaggaactttcaaaaccatgcaaatacatagaaattaaataacctgctcctgaatgatcattgggtcaacaatgaaatcaagacaaaattaaacaattatttgaactgaacaataatagtgacacaacctatgaaaacctctggggtacagcaaaggctgtgctgagagaaaacttcatagcctygaatgcctacatcaaagagtctgaaagagcacaaatagacaatctaaggtcacacctcaaggaactagagaaacaagaacaaaccaaactcaaacctagcagaagaaaggaaataactaagataagagtagaactgaatgaagttgaaacaaaaaagcatgcaaaagataaatgaaacaaaaaactggttctttgaaaggataaataaaactgatagaccattagtgagattaaccaagaaaagaagagagaagatccaaataagctcaattagaaatgaaaaaggagatattacaactgacaccacagaaatacaaaaggtcattcaaagttactatgaacacctttatgtgcataaattagaaaacctggaggagatggataaattcctggaaatatacaaccctcctagcttaaagcaggaagaattagaaaccctgaacaggccaataacgagcagtgagattgaaatggtacaaaaaaaaattgccaacaacaaaagtccaggactagatggattcacaggtgaattctatcagtctttcaaagaagaattggtaccaatcctgttgacactattccacaaaatagagaaagaggaaatcctccctaaatcattctatgaagccagcatcaccctaataccaaaacggggaaaggacgtgacagaaaacaagaaaactacagaccagtatccctgatgaatatagatgcaaaaagtccttaacaaaatactagctaactgaatacaacagtatatcaaaaagataattcaccatgatcaaatgggtttcattccagagaagcagggatggtttaacatatacaagtcaataaatgttttacactacataaactgaattagaaacaaaaaaaaatcttaaaagtctaggctttctgcctttactacacagagttgatcaactycatctgctactttttctagctctaaatctgattcacaatcattacaacccaggaaacataataggtgcaacaytcttttctgactctttaatagattgtttccatttggaaaaaaatctcatttatttgtyggatatggaagctgtttcataaattttccagatctgagtgagaaaaagaatatttaagtgaagattacccataaaattttgaaacacacatccctttttttttcttggtagaagaataagatttcaaattttattttcaaaaacccatcatagaaaataatttttgttttctgtatgcctagcaaggagaaaatctagatccagatttagaaaatctggaccggctaatttttgtatttgtagtagagatggcatttcaccacgttggccaggctggtctcaaactcctgacctcaggtgatccactatcctcagccttccaaaattctgggatgacaggtatgagccaccacacctacagcatgggtgacagagtgagattcagtctcaaaaaaaagaaaagaaaagaaaatctggaccatagtctgacatacttcctaattgcccggagaatttatgaatttatattgagtcttaacagtgaggccttagacagtgattcagtttcctcagtgctagtaatcaaattctattgcttgtgacaaacacagaagataactttagcagataatataacatagcagataactaagtgaacaaatacacttttctatagcaagcataatctagcaaatactaccttgttttttattgtgtaagaacacttaacatgagatctaccctcttaaaaagttaagtgtatatttgttttgttaactataggcacaatattaaacagcagacctcaagaacttatgatcttgcataactgaaactttatagcctttaaaataggaactcttcattttctcttccccccagcctctggtaaccacaattctgctctctgcttctgtgtttgactgttttagatacctcagataaggggaatcatgcaatatttgtccttctatgactggcttatttcacttagcaaaatatcttcaagtttcattcatgtagttgcatatcgtaggacttcctccttttaaggctgaatartaacccattatatgcatataccacattttcttcatttattcatccatcagtggacatttcattgtttccatatcttggctattgtgaataacagctgcagtgaacaagagagtgcaaatatttcttcaagatcctgatttcaataattttggataaatacctagaaataagattgctggatcacatgctatttctatttttaattgtgtaggtacctccacatagttttcatagatgcagcaccatttttcattcccaacaacagggtaaaaaggttccaatttctccacatccccaccaaactattatcttttgtgccatccyaacagttgtgcaatgataagtcactgtggacttgatttgcatttccctgattgtaagtgatgttgagcatttttccataaggttttttggccacgtgtatgtcttctttagaaaaaaatgtctatttaaggactttcccattttttaatctggttatttctatacttttgctaattaagttgaaagagttcctyatatattttggttattaaccccttatgagatacatggtttgcaaatattctcttccattacatagatcgtcttctcactataataatcatttcctttgctgtgcagaaactttatagtttgatatagtctgttgtctatatagtctgttgtctatgtttccttgtgttgcctatgtttttggtgtcatatccaacaaatcactaccacaaccagtgtcatgaagcttttctcctatacattcttctaggagttttacaatttcatgtctcgtgtttaagtcttcaatacattttgaaataatttttatgtagggaaagataagggtccaatttcattgttttgcatgcagatgcccagttatctcaacaccattggttgaagagactctcattttcccattgtgtgtagtcttggcatccacatctaggatcaataaaacatatatgctcgtgttaacttctatgctgtctattctcttccatcggtctatatgtctctatgctagttgaattttgattactgtaactttgtaatatattttgaaatcaggaagtgtgatgcctccagctttgttctttttcaagattgctttggctattcagaatcctatgtggttccatattaattttagaattattttatttttctatatcagcctaccttcagatatcaacacttccttctgtcagataatatttgcacatcctgttctctgtagcctggaatgctctcctcctctcttttcactgccaccatcataccacttatacctgcttaactgctatccatcagatctctgctgaaaagtaattccttagaatgtttttcagtaacactgttcacctccccactgccccttcccccccmcacacacaatacctgaaatctctgcctacctaaggcaggtttttcctgagttttttctcaatggtataacatttgggactttgataggaagtatgataaatytgcagattgcacaataagaagtaaggacatttgaacaatattaagtcttccggtccatggtccatgtacacaggacacctttccaattgtttgtgtctttttctttcattaatgttttgtggtttttagtacaagtcatttaccactataattawgtttattcctaagtattttattctttttaatgttattgtaaatgggactgttgcttaatttccttttcagwtattaaaaatgattcattattaatatttagaaatgcagctgattttgtatgttgattttgtatcctgtgactttgctgaactcatttgttacttctaacagtgttttttggtggaaacttcagggttttctatatatcaggtaatgtcatctgcaaacggggacaatttgacgtcctctttttcagtttgaatgccttgtgtttctttttcttgcctaattgctctggctaggacttccagaggagaagtacctaatgtagatgacaggttgatgggtgcagcaaaccaccatggtacgtgtatacctatgtaacaaacttgcacgttctgcacatgtaycccagaacttaaarcataatttaaaaagaagggtggtaaaagtgggcatctttgtcttgttctggattttagagaaaaaactttccattttcagcattgagtataatgttaactttgagcatttcatgtatgtcctttagtatattgagttagtttccttctattcccaacttgtttagaatttttatcataaaagggtattgaattttatcaaatttcttttctacatttattgagatgattgtgtggtttttaccctttattytattaacatggwatatcacattagttgattttcatawgttgaatcatccttgcatcccagggataaatctcacttggtcatggtgtctgatccttttaatatgctgttgtatttggttggctagtattttgttgaggatttttgcatctatgtttatcagggttattggcctgtagtttgcttttcttacagtgtctttgtttggcattggtatcagagccaaggtattttacttggtattttaatatttggcctaataagatgagtttggaagtattctgcttcctagattctttggaagaaattgagaacatctttaaatgtttggtaggagtcaccatttgacttttctttgttgaaaagtatttgatcactgattcaatgtccttactagttataggtcttttcagattttctattgctcagtaattcagtcttggtaggttgtatgttcctaaaaatacagccatgtcttctaggttatccaatgtactggtatataattgttcatagtagcctcatgattctttttatttctatggtatcaattacaatgtctctgcttctgttttcatttatttgtattctctcttttttccrcagttatactattggggaaagttatactaatatcttgttaatcttatcttttaaacaaaccaattcttttattaaattttaaattatttttctattatatatttcatttggttctgttctaatctttattattttcttccttctgctaattttgggcttaatgtattctttttctggttctttggggtgtaaaattaggttgtttacttaagatgacctttttcctatgcggatgcttccttccatttctcctgcccttggacatcagactccaggttcttcagccttcggactcttggacttgcatcagtgstttgctcrgggctcttgggcctttggccacagactgaaggctgcactgtcggcttccctgcctttaaggcttttagcctctgactgagccaatactggcttcttttctccccagctcacagacagcctattgtgggtatttgccttttgatcatgtgagacaattctccctaataaactccctttcatatattcawgtatcctattagttctgttcctctggagaaccatgaataatacagcacataactggaacttgaggtttttaaaatccatttagctatttctaagtcttcatggagagtttaatccatttacctttaaagtaatcattgctaaggaaggatttactattgccttgttgttaattgttttctgtctgacctgcaattcttttatctctggttatcttcctttgtattttttaaaattttttatattgatattttatattgaaattttatattgatattttatgtaggtattatctttgtggttaccaaaggtttayataacacaacttttattatgttatctattttaagctgataacaacttattttcaatcacatacaaaaatccctgcccccacatactttgttatattattgatgtcacaattcacatgtttttatattatgtatcttttaaaatatttttataggtgtggttatgtcagtacttttctggcttttaacttttatcctgaaagtaaaagtaatttacacascaccattacagtattacagtgttctgttttgtctatatatttatcttcaccagaaatttttgtacttccctttccttttgttctgtcatttcacatcattttgtttcaacttaaagaactcccttaagcatttcttgtaaagcagttccggtagtggtgaatttcctcagcttgtgtttctttgggaaagtcattatctctccttcatttttgaatgatggtgttggccatatatagtgttcttagttgacagattttttttctttcagcacttttaatatatcatcctgctctctagtgacatgcaaggtttctgctgagaaatctgctgacagccttatgcagattccctgtatrtgataagtcatttttttcttgttgctttcaaaattctatttatctttggtttttgacaatttgattataatgcatctcagtgtggatgtctttggatttatcttatttggagctcttaggcttccttttttcctccagatttgggtaatttccaaccattatttctttgaataagctttctttccayttctgtctctcttcttgtgaaattcccataatgcatatataggccacttgatggtgccctataagtcccttaagtgagcttttatcactctttttcatttttttctttttgttcctctaactgaatwatttctaatgttgtgtctccaagtttgctgatcctttcttctgcttgatctagtctgctgttgaatccctctagtgaatttttttagttattgtattcttcagctcattgatttctgagctggtttcttggtagtcttttttaatgttttctatttctttgttgaaattctcactttgttcatgcatgttctattgacctcattgagcatctttctgatggttattttgaattttccatcagagacataatatatctccattgcattaagtttgatttctggagattaatcttgtactttgttttggacatatttacctggttgtttttcccttggttcttcattttagtatatctggatgttawacaaaacagctacctcttccagccttcatggactggcctcaaacaaaagaagaccttcacctatcagcctgaccagagattctgggggcttctcaaatctgtatgctaggcaaaaccatcagctatgttcttagtagctcccagatgtctagaatatgctgggactcatctgcattctaagacaagtgagacagaagccagttcctcaggcaatccctggaaaaattgaaacgttaaatatgtgatccaactcttttcttcctcaggaagtagatgagatctgtcgtttttctcccacttgctctgtgctgagcaagaccctcccaggtctgtgatgggggccggcatgctagttcaaacagccatctttatttttagtagctccaggtgtctggaaaattgctgagtctcatttgcactctgagacaggtgagacagaagtcagatccttgggcaacccccaggaaaatcagaatgttgaacacataatgtagttctttccttccctctccggagagaagctgggaactgggggtttcctcccaagcatatagcaatacactgagggtggggattatggttagaggatgtctcaaagtttcctatcagcttcagtgtggttggttttttgttcacttcagatccaagagcttctaaactggcttctgaatttattgcaaaaggagttgacctgtgtattggttgttgaatcactgggtttatgatgggaacgaagatccaagtcttcctattctgccatcttgctgatgttactgtcctctaattcttgaatgccttctatgtaacagagaattttcatgcacactatctcatttacttttcttaaaattctgaacaccaagttgacaaaaactaaatcgtaaagtataagatttagtaaaaatgtaggctcaaaatttttaatcacaaagctggtaagaggatttgaactcaggtacccaaagcagagtgtagtgytcctctacccagggtgtcaaggagatgtgtcaatgtgtagcacatggtttatgttcctygggtttatttaaagcctctgagcctcatgtgtgtgttgctgtagtagtggaaaccactatcttgctaagaaggcttcacattggatkgacagcaaattaccttttccattcattcacctattttcatgctgaaaatacttctcaatatttttgagtcaataaacaagaatgacttgttaaggctaggcttaccctagatggctcaggatcttgctggtggaactatttatgcctgcaaactatgaaataaaacytttgaaaactaaggccttgctaccagcatgtgtcttgtggatcagcagcattagcaccacatagaagcttattagaaatgtggaattgcaggccgtatcccagacctcctgatttcatatgcctttttgtttgaaaaagccctactctaaagcacaatatacattttgatgcttttctcatgatgtaataattttctagtatgtttgtgactaaatgcagtcaagaaagccctcaatttcttatttttctatgttcccttattttaaaataataaataatgaagagagtcttcattgcctgttagaaaacaatcacttatttacaacaatagctttacaagtccagcaattcatctaaatgcccaatttgccctgtagctctacagcatgcccacagagccaacctaggtaagctatattctttatgggaaaaaaagagaaaaataagttgatttggtaagtttttgaagttgaaacattgtaatggaaatatcactggactgggttcaataagacctacgtttaagtaagaattttccttgaaccatcaagatattcttggacaggactctttccttttctgggtcttgggtttcctcatgtatattaagaagttggcataacctgtgctccaaggtcttttcccacgcagaacatttgctaatttttctttaatagatctctccttgttccccttgtaaaccaaaaataaaattctcaggccccaaccatctaaatggacttcctcttcatccagggcactcttaaattttaacttgagacaccagttcttgtcatgacaggaagctggaggtcagacatgcctcactctacctctctggcattaatatgaatacagactttaagcctgataagaaacattttacagcccattctctctgaagcctactaactgaaggtttcctctgcaaataagaactttggtctccacaattctttatcttaacccagacatttctttctattgatcccagatctttacataaactcaaccaattgtcaagcagaaaattttcaaatctacctgtaagctggaagcacaagctccaagttgccctgccattttggaccaaaccaatgtatttyttaaatgtatttgattgaagcctcatgtctccctaaaatgtataaaccaaggtgaaccacaaccaccttggacatatgtgctcagtgtctgccaagggctgcgtcacaggccatggtcactcatttggctcagaataaatctctttgaatattttacagagtgtgactctttttgtcaacatcttcatctcctcccccactgctatttcctagtccaagtccttcatttattgctatagcttttttttttttttttttttttttttgacagaatctcgctctgtcgccaggctggagtacagtggtgcaatctcggctcactgcaacctccgcctcctgggttcaagcaattctcctgcctcagcctcctgagtagctgagactacaggtgtgcgccaccacatctggctaatttttgtatttttagcagagatggggtttcaccgtgttggccatgatkgtctcgacctcctgacctcgtgatccgcccgcctcagcctcccaaagtgctgggtttacaggcgtgagcaaccatgcctggcctgctacagcattttaactagtctcctgattcctgctttcttggtttcctgcttcctcagttcaactagtattcctttgttcccaaaagaaaagctgaccatgttcatctcatgcctggaacactttaacagccccaaggctgtttctgttgcttgaaggtgctatgctcatcttctgtccctaaccacactgctactttccatcccctcttgcctgaaatataccacacacaccagcctctttacttagcttaatgttgctcatcttttttcttttgagacggcatttcacccttgttgcccaggctggaatgcaatggtgcratcttggctcactgcaacctccacctcctgggttcaagtggttctcctgcctcagtgtcccaagtagctggaattacaggcatgcttcaccatgcccgactaattttgtattttttcagtagagaccgggtttcaccacgttggccaggctggtctcaaactcctgacctcaagtgacccacccgcctcggcctcccaaagtgctgggattgtaggtgtgagccaccacacctgcccttgctcatcttttaagtgtcatcttcaccgtcactggtaaaatactcttgctgccatggtgctctgtgcttttagtcataatatttgttgcttcttactgttattgcttatttgtaacttatctctgtgagggctgagaccagtgttccgtgctcacaatcatgttcttgtagataataccaagtaagcactaaaaataattgcttgaattgcctatatgaattcttgtcttctacttccattgttgattaaataataataagctctaaatattgctttaaggaataggcataattcactcaagacatgtagaraaattcctggcatatattattcacttaatgtatgctagctattacaattgttattattcttttctctctttaattacagcagtcagtatgggcttaattataattacctgataactaaaaatttctttcttactttgaagctaaatggaatacttaaaaatgtagatgcattaatcaattaaacaaatgcatcaggttaatagtatttcttattccaatgaaacaaagaatcatattgttatatactatatatataactcatcatattattataaattatgcaccaatatatttgcaaaataatgcattgaattattattaaattcttctgcaaatggtgtgtgatttgttttctcaaagcttaacttaatgggaaaggcttgagagaaattgtcattgtaaagaaaataaatcctggatacttatgacctaaaaggaaatctggcatgtatctcttaatattcttagaaattactcaaaggttcagcttttattaattcataactcttcaaagttatgaatcaatagatcctaaactccaatctcccatccaatatttgaatctctgtggcaccatcttagcccagtgaatgaacagccactgcatggaaagggagaagattaaagctctattagttcccatagcaacatatgatttattaaagttttatctatgatttttttaagaatgcattctctgcaaatcagaaacaaattataacatagtcatagaagaaaaaatgaagatggatggtggataaggaaacaattgagatatttatattagtttccttctttgtcaggcattaaataattatacaggtaggagttataaccagaaaagatgcaaaatatcagtcttattctatcrccattatatcattcaatattactcttattcccaatttacaagctttcttcattgtctcctagctattctttgttgatattctttctctccatctgattcctccttcctccctttttactttcatgcttctcttcctactagctctctttgtttgtccaggtattctttcatttctataatacaataatatggttttaccttaataacccagaaactgaactataataataaaaataaatactctgacacaggaggggtaggctggacagccacagtgagaatatgtggttaaaggctcaaaacatgtaggctggttatgtggatggatagataaatttaattttacagatatttctcaagttccaaacagtaaagtactatgctgtatactgtgatagatgataggtgaggtctcattttctgtacttcaatggctaaaatctcccagaaattttatatacagaactaactaaacatagcacaaaggagatggtaagaaacaatgcaaagagaggaagaagtgagaaaaaagaggcacagcagaagagagaaggggaatcttatgcagggaggaggaaatagaaataaagtagttaacaaatggaaaattaacatggactacaagaaaggcatgtttcagaacttcaagcacattaacattggttttttcaaatcatgtggatctaacacacagccactggtgaaaatgctgcgtgctatgactttattcagtttttttgttttgttttgggtttttttttggagactgagtctcactctgtcacccaggctggtgtgcagtgacacaatctcggctcactgcaagctccacctcctgggttcaagggattctcctgcctcagcctcctaagtagctgggattacaggcacatgtcaccacgcccagctaattttttttttttttttgtatttttaatagaggggggtttcaccatcttggccaggcaggtctcctgacctcaagtgatctgcccaccttggcctccsaaagtgctgggattacaggtatgagccaccgtgcccagctgactttatttagtctttattataaattgaataaaacctttgtaaatagagatattttgtttsttgtaacctgtgtggattattgtaaattagcatgatatacttgtttcagaccaccaataacagccatcttatgaacagaggctttcaaataataggcaaatgtgtgaaaagagacttaaacatttctgtaaagaattctatgaaaattttcaacattgtcattagaacttgtaccattaaaattttctaataataaaaatcatttttaaaaattattttaatgatgctaaatttctatttttcactttttgaaatacatatggtagcaagcaataagaaaatatttaatgatgacatgccaattaacaagttcaatatgtcaagtaaaagtaataatgtttccttaacaccaaatagcacagcatgatttatataaatgcccatccttccaaagaatggaatcctttcacttggtgcaataagttgaatactgtctttttacagctgttcwcaaagacaaagatatttttgagcttcatttataaaacataaatatcatattgttgttccagmcttcttgtaattcaaaatagcatcagtgctggctgaacatattactcatgcattggaaagttagaaatggtgacaatttgaagttaacattgtgaaatgaagatgaacgtgcaaaatgttctagctatattctgttttatgtgaataacctgaacatatttcttctttatatattggtttaagaagatgttataaatacctaacttggggacagaagaattttagtaaaggagaagagacatttaaaattacttctacgtcttactctaagaacaatctgccaattagtagagttgtatgtttccaggtacacagccatgtgtcctaagattcagacagaaggttgtgagtttacaggaagaaagaaatcgattctttctggggtatcctaaaggcttctcacagaaagtggcacttgaatagtgtcagatatttgaagcagggacaggatatttcaacaagaaggaatgcataaataggacatagacagggaagcagccggggcatatggagactggggagtttggctatttaatggggttcatggaggttgtgacagagaagtagtgtcagataagatggatggtaaataggggactaattgtggaaggttttgagtgctaagctaagtaattcagtttttatttggtaatgaataagaaaccccatggttttttttcccccaagttttaaaatgctgaatacacacatgatcagagctggctatttattggatacttagaatgcacccagctatgttaggtggtttataaatattatccaatatgatcatcacaaaagtatggttgaaagaagtattaaccccatttttcagatgagagaactgagtctcaggctatataatttgcctgtgtacaacaatctaacaagctgatttttttaatcaaaatctttttgttcattactctacataatcctgttgttttcataattctattgttttaacaaaatcctgttccactataatcctgttatgcttcataatctagtattttgaagaagataaaaatagaaaagattgagaatatgtcagagactattttaatagcgcargaagtaatcattctgattcagttatgtttgtcactagttcaagtaacggcaaatctgagttaccatggtttctgaaaaaatgcacattgaaaaattgtatgatggttattttagatttttagcatgatgttgaggtttcctatgcaagggaaattttaaatttgttttttgcctgttggatttcttatgttattcagaaagttttgcaatgcctataatgggaactttcctagtaatatgcattaaatgtaatttccacctttttagaccatcaaaattaagcacatagtgtgtgtaacatctaaactatggcaagcaccttaattacatttttcctcttaatctcacaacaaccttgtgatgttggtgtccttctcccattttatagatgaagaacctaaggctgagagaaattctgtctgtatacgatgcaaccaacrttcatattcagccctatttgtctttaaatcactactgtttccactacagccaactgccctgtaactcctcatgtaataaaaacgactgatcttaaagtgataattcatatttcatgattgaaaaagaataaggaatcatccgtggcacaaacctgaaatgcagggagtgtagaatctatgttaatacataggctttgggatcaaaggaatgtgagattaacgctyatatccaccatcttaaagctgtgtggccttggatgtattacttaatctttcagaggctcgactgctaatctgaaaagtgcaaatagtaatatctacttcagggagttgttaagaggattaagtgaaataatgcctaaaaagtacttaacacaaagtaggctctcaataaaagtaagctctaggtgcatagcacactatgctatttccttgattctcatagcttcatctctgagtcaatcacttccaaatattaggtccaaacctctcttctgaattctggatccgtgtatcccatcacctacttggcatctgcacttggatgcccacagtcatctcatactttatatatatcaaactgaactaatgatatatgtcaccctccttccttccctgctagtatgtgctctcctgcttttatggtagtgaggtaggggtgagtgtgtgtgtgtgtgtgtgtgtatgtgtgtgtgtacaaaatcaacactgtaaccagcccacaactaatccattcttaagtcactcagtgctaagggatatgccttctaaattccccccaataccaccctagtcmtagtggccatcatttctctcctaactaatgcagtcatatccactgctgcctatactcaccaaccagttagccatactctaaccagagggaccttcctgccccttgagttttaagattggcttaaagtcttattccactttgatggaaatccaaatcccccttggagtttttgttaatttggtgtaaacattcattcttataaattcttcttccctcaggagccaacttccacaaatactgcttctgtgccctaacacctccaggtgaaacccagccctttctacaagttccatggatgatccactcatacaaagcatttgtgaacrttgggactcagggtgacggagaactatttgctattcagaatgtgaactccccaawggtgcattagatatttccagtcttgaatgtcctctgccctcctcaccatctggatgtttccattggcagattgccccttcttcatcccagcatcatatcatcttgggggctctcatcttataccctttttttattccagatttctttattctttattctttattcaaatccrttgtaatttgaatcccagtttggatgtctggtttttgtttgcttgcctaggttcctcaattcaccccatcagtatttccttctatcccaagtggttagttaccaagtatttttccaataaaastttccacccccartaggaattctggagccagcaagtaacatcataaastttttgcttctattacagaaggtaaatcagatcatcccacacccctgctgaataacccataagtgtcttcccatcrcctttagcataaagcctctaacttttttagaagggtctacaaagtttcccatgatgccacctctactggccattcaaatgttattttggtttctcatccacattgtgctttctccagcacccaggccttcacattcaccgtccttaggtcctgttctttctctccaactaatcatcaggtcaactcttaccagcccataggtctctgcctaactagcacttactctaggctgcagccacctgctaggagctccttgatcatcaaatatttcttaacaatgctttttccacttgcaattatctagttatttaaaataatgtatttcctctctctccacagactcaaaacaccactagaacagaaaccagatttcttaactgtcatattctcagcaagaagcatacagcaggcactcaattgttaaaaactatctgaagtaaacattgagtcaagcatctgtgtaaaggattgccctaaatctcccttaacttctgggctttaatttattctgcctatatagggatcagtctttcagaagacccagaaaaccttagtgaaggtggagggcttattaaactatttgctttaaagttctgacaattttgttgttgctgatattaacaacccaacaagaaggggagttaaagggcagtgcttacaaaaggtcacaatatactgcctaaatatgctgtgagcttygtaagtaggctgcactcttgttagctatcatcaggatttaattaactggtgtcacagctgaattgacatttcatgcctgtggggaaatttgactgaactcatccattccgaaataaatgattagcaccaccatctttcacattatctttcaataagtgggacagctacattttcacaacttgctggggaaaaaccattttcaaactctaaataccagtaagcatggaaaagaaggatrgaaaataataaagtcaggcaaaatgatatttgtgggtgcttcattttatgaaaataaaacttgtttcagaggcagaatgaacctgttaggaacccctgtttttcataacaaattatgccagaagaatgttgcatagttttggaatttgcctgatcactgaactgttgagaacaaatgtattttatgggttcctgggttgtgggccgaccccctacccagtcagacaccagccaagcacagcttccaggtctttaaacttctcagcacagtaggccctaaaactgttcccatggtaaccttccatcaaacaggygagctgtaaaacaggtgagctcaggctgtcatttgcagacaaaacaagaaaaagaaatactgactgctcttgttcgtgatgccacaaagagaagtaatactgattactgaataaatagactgaaagtcagaatagctgttgaactaaataggaatcatggcgttagtgtcctgacmaaaaaaaaaaaaaaaaaatacagcttctaaaatgtgtatgtctcaaagaaaatcaatgagaaaacagatcacaaattttgtagaaacattagttactgtttttggaggatctcctaaatatcggatccttggatggaaaatttgcatgtatggtttcatttgtccctaccccctaaaaaacwgtcataataagcttttagtatttccatgatttaccttaaataactgaggttcaaagaataaaagtgagagactgtcacttaagtgggatttgaacccagatctctgtgtctccaaaatttctgtttttttcatgatgctacactttttgaggatttatcaggcatattctagaagaagtcagtcacagtttgtgctgagggaayttgccaccaattaagtacagatatgaaaggtagcatttgggaaatcatcttggctccaggatcttacagtctggggactgtagtacaatagagtcacaaaatctgtagttataagaattgccttgagtactagctcctccacaatataatagggtagccttgagaaatccatttaattmtttgaacctcagtttcttcttctgtgaattgagacagtaacttaacggaatgttctgaggatcaaaggagaaaatatatttgaaagtgctttctaaaatataaaatttggtatatgactattattattaccctacatatcacataaaatcttggcacttctttttggcagaacaatttcttttcacttaaaactggcaggttgaattctttcctcaagtgtgttttgtttaatctccaaaattaggagytgtgcagagcttccagcctgagttcattttagaagtcaggaaataattgctgcattattatatatattgaactgtcattttacacrtgcacacatggcaacttgatgagaaaatatcatttgtacttattttaaattaatgcttaattggtgacagactttagctatcacctacactctggttgggccaagaaaatagagtatgatctagaaactgaaggacaaaagatgagtaatggtcaaggaaatggcagtgcaaggaattcaagggctataacctggcagcctacaggctggggcagacctgccaatgtattttctttggctagcaggggtttattttgttgtaattgtgctttttaatgatgttcttaaacagtgcatgtaccctccagtctgctaacattccatcatttgtatcctcttacacctggctgcctctcacatgtatattacctgcctgacagtaattgggagatgggagtccctttaccaaacaacaggcaaaagagatgagttttcttcattttgaaaccataaagaatgtatctattgggaagctgaggtgggcagattgcttgagcccaggagtttgagaccagcatgggcaacatggtgaaaccctgtctctacaaaaaatacaaaaaaataagcagatttggtgtcgcatgcctgtggtcccagatacttgggaggctgaggtgggaggatcacttgagcctggggagtggagattgcagtaagccgagatccggccactgcactccagcctgcatctgatcatttaacacaggaaagactgagcatgcaataggctcaggcaccaaatcccacaggagtagagaactggcatactctatctgaaaggatacatttaggatacatattaaaaagtctagtaatccacagcccattgtaaatattctaattcaacaagcatttaagaacctgccatatgatcttcaggaaagtttctggcacagagtaagtatgatgtaagtagatgctctttgttatgtcatcatcatcatctttattatcatcattgctattattattggtcagacacaattctaggaagggcaaaggctcctaactcctgtcttcctctttrctcccaaatagagggtatccccagtgttctgctcagtttctgatgcatgcttgttgcccaaaatatatctgaggaatggctgcataaataatggaagactagagagaggccatctctggcctttgagatcaacagccaaaatctgctctgacaatttctgagagttgtgaataattctagccaggtgtcagaaggaacctggcgagtgtagccccgggactctgattttcctgaagaaactgaaaagaaagaatacccaggtggaaaaggtacyctggtagctggacaggatgtttagtggatgcattatgyaatgtctgcagagaatcatggccataagtgctatgtaagcaccaaacatcattaatattactatttaaaagaactgagcagcctattccttcctrggtggtaacctgagcacagcagaattttaataagtctgatcatttattgggttgccagctggagcactgaccatgctctggatgtacgtcacacagtctgatttggtgcaatcaacactggctctgactcagcatcttacctgcctgaactattgcaacaccctccttactgcctattggccttacatcatcccagtcagcctgttattctgcatactcctaattatataagtctkgctaaactgtaatggaatcatatcacttttctgcattacaagagttcatgatttcctttggcctaaaaaatatccaaactccttagcaaggcgtgtcttggtcttgggtcaccagcactctattctgakcatcctccgttgatctaaacactctagaggtctctggatgctcttcccgcttaacaagtgccttttctgaaccagattcccctggcaaactcacgagcatctttcatacatcacttgctccctgaagccttccctcacacccatctgcaggagcagaattgagggctttcttgtctacatgtccgtggcactgaacagttctcttgtattggccaggatatttggatgcaaatcttggaagtctagatcaaacaaattaaagaatatgttgggctttattcactcgtgtcaccaaactgcacagtggctgagcctttggatgagtgtgaccaggacctcaraccaaatcagggagtctaccactagcaactatcttcatggggcagaaattacaaacacttcagctctgcattcatacatactgaaagccagaaaggaacaagagctccttcccatgaattctagttataaaacttcagaggaaccactctggatggcctggcttagtccacatgagcatcacaggaaggggaccaggtgccatgattcccctagactgcttcaaggtgcctgctcagacccagtgacagggtaacatgatcagcaacccttgtcaggccctcattagatttagagtgggaaagaagcagtgtcccataagaaggtgcaagctcagatagaatttcagacaggcagaagagtaggtgtcatctggactgtcattcaaattcgataactaataacacttcagatcctaactgtgtctgtgagtttgcctctcactacagagtgagctcctagagttccagtacccatcttactcatgtgcctctgctcacacctagcatgatgcctgttgcccggttgccacttagctcatgcttgtgtgttattgaattaacaaatggatagctctccagggcyctgtgaacaaaacatccggtgaacgtaattaccgaattctgtagtgtttggaagttagttaaacaaatgtttataaaaccgctataatttaaaagacattgagtggctcatgcctgtaatcccagcactttgagagtctgaggcgcacagaccacctgaggtcaggagtttgagaccagcctggccaacatggtgaaaccccatctctactaaaaagtacaaaaattagccaggcgttgtggtgggcacctgtaatcccagctactcgggaggctgaggcagcagaattgcttgaacccaggagacagaggttgcagtgagccaacacggtgccactgtgctccagcctgggcaacagagtgagagactccatctcaaaaaaaaaaaaaaaaaaaaaagcatcaagtgactcaaaactaaaatataacacaataacctttgaaatacaactagtatttattgagttcatagtgttagcatttttacgaaagacattttatgctcacaaaaattccatgagttttagcaattagccctattttataaattaagaagatgaagttaagagatgcttggacttcccctagttctcacaggtaaaaggctacagaggcggaagagaaacccaggacttctgatctcaaggctattgctttgctcttaagcaagttatttaacctgtctgggtaaaatggagataataactcttgtttctaaggattgctgtgaggagtaaaagaaaaaacatatataaacaaatgagcacatagcctggcccagatgagggcattaatggacaatagtgctaaattttcagtgatggtgggagctttcyttcaattctgactagaacatatctctgacccgtttttgtccttgccccgcagcccaggaactcgtcctgtgttattctcctctttagtgccacccactctgtctccagtagcttctctccccgaagactgcttccagaacaggtcacaggctcctgggctccccttcttgctgaagccaagtgcccagaccccttttgctgcctcggttagctggccccactggttatggaaagataagtaccaagaggcataaggatatatggatcctagaccttgtyctgacatcaattwgctgtgtgacatttgtaccgctgttctctcaagcgtaaaatgagaatgctggaccagagaaatcactacattaaatttgttatgtaaaggaaatytcagtaaaaatatttttcctgcagagtcaagcaatattattacttcatctcaaaaaaagttttacatatttttttacattaaccaaataaatcagcattggacttgcctacatttatcagatcagtttctattacttttaactgttccttcctgctctacttctcagcagggattacatgcctgcagcgtacactcagaattttctcctgaacatagattccaggaaaagctaaggtaaagaagacagagtagaaagcaagagcacagatgacacttcttttaggcgcactgcctagatcgcacttggcctgctgtcttcctctcattagtcgcaccaactgaatctgattagcccactctgatttatttttggcaacctggaagtgcatgggccaatgcttattttcatggctgatacaatcatccccaaagctgtcgttagcatttggaagattagtccctttctctggatgattttattgcctatgaagcatcacgacacacattagacatrtatttcttaaacactttacaaaattgagtctatttactcttcttcttattatcacaaccaccttctgttattggctgctaaaacatagagaaagaattcttcataattacatatttgatgcttatgaacttattgttttctgagttagtgaatcatctgctataatcaacaagaactaaaagccagatttcaatgctactggttactcagtgcctgatttgtctacattttgcttaacagactttcccattatgcaccaaacagtactatctaggtgaaaagtgaataataaggaaatataaataaatattttctcctaaaaatgcaactttcagatatgaagcacaatatgtatatgatttctatttatatttgtggacagtaagatttattagtaaggatcattatttttaggtctttgagatacaaaaattctgagattccraataagtcctaaagtacrtttagtataaaaaatgtatcatgaaaaatgaaacacactttggcaaattttccaataggttaaaagtaaaaggattttccatcagctctcggtgaatttgaaagcatatttataaccaggattccccattcactaagcatttaatgaataaacagccastgaccacsagcaaacttgcagctctggaggcaggactgtgttttggatccccagtacttagcaggctgtgtggttcttagtagattcttaatttgtatcgactagatgagaatatcaattagtaacttctatcatgggtatgattactctttcttttcctcgtacccaagtctcctctatccaatgaggacatctcagctgttccagatcccctcttgtaaagtctgtctacagaggattgtaaggaaagcaaaaagatagaagagaagaaaagataaaatttgcagagagagaagtttaaagagagaagggcgctatgataggggaaaaatgagaagtttaagaagtattgctggagacctcgggtgctctagttgattggggtctaatttgttgttgctgtggtggtggtggtggtgccagaatttaagaagtatttcaatgctgatgaattttccttaagaggaagggaagatgatgaggcaggagatgttgaggccaaccgacatattacttgtgttccctgcttgatcccggcaatgcattcaccgtgagatgaaggagggctctttgttttgcttaggaaggctagagggagggctctttgctttccttaaaaaatgcattgttcatgtccttcgcccactttttgatggggttgtttgtttttttcttgtaaatttgtttgagttcattgtagattctggatattagccctttgtcagatgagtaggttgcgaaaattttctcccatgttgtaggttgcctgttcactctgatggtagtttcttttgctgtgcagaagctctttagtttaattagatcccatttgtcaattttggcttttgttgccattgcttttggtgttttggacatgaagtccttgcccacgcctatgtcctgaatggtaatgcctaggttttcttctagggtttttatggttttaggtctcagttctcaaaagaagacatttatgcagccaaaaaacacatgaaaaaatgctcatcatcactggccatcagagaaatgcaaatcaaaagcactatgagatatcatctcacaccagttagaatggcaatcattaaaaagtcaggaaacaacaggtgctggagaggatgtggagaaataggaacacttttacactgttggtgggactgtaaactagttcaaccattgtggaagtcagtgtggcgattcctcagggatctagaactagaaataccatttgacccagccatcccattactgggtatatacccaaaggactataaatcatgctgctataaagacacatgcacacgtatgtttattgcagcattattcacaatagcaaagacttggaaccaacccaaatgtccaacaatgatagactggattaagaaaatgtggcacatatacaccatggaatactatgcagccataaaaaatgatgagttcatgtcctttgtagggacatggatgaaattggaaaccatcattctcagtraactatcgcaagaacaaaaaaccaaacaccgcatattctcacwcataggtgggaattgaacaatgagatcacatggacacaggaaggggaatatcacactctggggactgtggtggggaggggggaggggggagggatagcattgggagatatacctaatgctagatgatgagttagtgggcgcagcgcaccagcatggcacatgtatacatatgtaactaacctgcacaatgtgcacatgtaccctaaaacttaaagtataattaaaaaaaaatgcattgtattccccacactaaagtaagctgatgatggtagaggaagaattagtgcccctagtaaagacaggatccaaccccactgggttagctgtagcagcaagggtatgggggcattaaggaggagcaggagttagccttcagagcgtgagtcgggacaaagtggcaagaacaggagcacccttgggcaaagcagcccaccaggacaggggctgatgacttcactagacagtcaagtgctcccgctgcactttgggtctgtccatcataagcacacattgtgctgatatcctccatggcaccatcagagggatgrgagggcatcccatctacctttgaggcctggaacctctgggtgcatgggtatctcttgcacagctgtgacccaccaccacactatacactcatcaacaaatkttcctcacctggcacattgcccagggcttgctcttggactgctggcactgccctgctccaccaagcaggggacaaccatgactcagctgctctgtgtttctgatggccaagaaaattgttccctacwttctcaattcatttttcacacccactattgattcgacacccccttgggacactgacaragcaaagttggagggtatgggtacaagagcagactgcacatagggccatgaaccattaacaatgcaatacttctagatttggtgcaggaggctagaatgtctgtgatcaccagccaataggttttaacagaaagtatagtaagggaaaagagatcaagcatctatgatagcaacctagacctttctagtcatattaaggatactgacaattgcttcaattactaatagaagtctattaacttcaaatcctagcttatgaaatgctgtggttgaaaaatgtcaactctctttaaaaatattctacagatgaatgagcctggcttagtcaggtcttaatgtgcattagtgttaatcccaatttatgttatacaggtaacaatctaagatcaatttttctttttaaggattacaaacctttgcgcatgtgtgtttaatttgggtatggggaagggagargaagcagttagagagttctgtttaccctattggcagaaaagggccaacaggcacaggtcacaaccacaggcaaaaggaggttagagtagcctattattaaattaattttttttttctttgagacagagtctctctctgtcgcccaggctggagtgcagtggcgcgatatcggctcactgcaagctccacctcccaggttcaccccattctcctgcctcagcttcccgagtagctgggactacaggtgcccgccaccacgcccgggtaattttttgtatttttagtagagacagggtttcactgtgttagccaggatggtctcaatctcctgatctcgtgatccgcccgcctcggcctcccaaagtggtgggattacaggcgtgagccaccaggcccggccattaaatttaattttttaaaatacatactcttctcatcttcactcttcaccttcacyttcaccgcactgaatgtgcggaaagactccagggaggaacagaagatccccaacccctctattctagggatttcatatgtaaagcctgagacggtgaggatgaagaataaaaaattgtttatgaaggggaagaaggcatctgttgctaccttaaccgtcagatactatcatccccagcccctttttgcttccttagaaagagcccctgggaatcaatttgactatagaacaagcccttcctctagaggggcactcaaaccccaacatggaattggaagctctggggttaactgaggaagaaggggagaatygatagcacctcagccagcaggggagggggtctgcccttcattaatctgtaatcagccagctggacagacggcagcctgtgtttcaattgctcccatgtgaacaatgactttttccttttatgtgttctgctccccactatttcatagagagcctccctcacctccactggagacactaggtttcttgatcttttcttcaaagagaagggaggggagaggaggttgtaggtggggcaaagcccatctcatctcttcatctaagtcagagcatttgctctcctaaaaggaacctagaagggaagttctccaagttcttgctcagataggagcagatttctctcccccagcacaggtacaagacagtagcagaatacactggtcttgatgagtgatgccatcagtactgagtagcagagaggaagatttcaggaggcagggaggtagggcacatctggcgctggtctcaccctgatgcagaagcctagccctgcactgttctcctcttcagatgagtatgaggatcaccacagtcctgttcactgtagctgaatgtgcggaaagaccaggcacccatgagccaaggggtcttccctcagtcttggtgtgcaggcggcacactacttgagccctagatatttttaaattcctttcggttgtgtgggctgcattctttaggacattggctaggactaaatgactgaggatgaaaccaaatatgcctatattgcaaggattctcttgattttttttaaaaaaggcctttgaataacacagaactatgttcagttctagaattacttgttttgttgtttctatttctctggtgagaatttttaccctttcattcattatgagcatacttttagtttattaagtatagtaataatacctgatttaaagtacttggctacatccaaaacctggattttctcttgaaaattagtcacattttcttggatmtttgtatattgactaattttggactatttcttgaatattgtgagtattatgttataaaggctgtaatatttatgtttcaggattaaactaatatttttgtcttagcaagaaattcacttggttggatggaacctacacatgctttctcgtgggtggcagcttgaaccttaggacaattcttttagctttggctgggctacctgcagcctgacctccccatgcatggctcaggaatcagcctgaggtttggacagactttaggaccccctccttttcaggattacctactcactttccattagcagtggttgccaagattctctcatcttttgcctcaggccagaaagactgagattttgtcagagtttcagctatctcacactgactgaagcatctgccctctggctataagctgatgtagaagatggatggatggatggatggatggatggatggatggatgcatggatggacggacggacggacagacacacacacagacagagagacagacagatagatagatagacataaaaataactcattctgtgccaattctgtcaagtgtcaactgccctccaaaatctctctgctttgttcatgattcagtctttagtcagttgtttatttggtaatttgtccagagtatatggttatttgctggagaaacagtcagagaggaacttgcatggccataactgaagcagaacttgcagaagcataattcaaaagaaagaaaagagtaatggataagggaaggagctagtatttgttaagctccatgtataggcagcacattaaataccttttctgttctttttctgttttcttgtgttttatccttcttgcccaaacaatgaaatgctcttatgaactttatgctagcctcacaattccacgtggaccactggcaatatagcatggttcatattttgtgtttgatcccagaagtacattgctcaatgttagaaacctgcccatgtgtctggaataactgccttgatacattctcctagaattttcctaggaggccacagcctcactccctcgtattttttcaaaacatgtaatttcaccacatagctgaaaccaagaacttccctagaacttaagtgtcaaaatgactttcattcattaattgactccttcacaagatgtttattttgtttattacatgacatagtccaataaagggatgttttaaaagttcattctcaatgcctatctcatattacagaaatctgcctaggatcaaccacatgaaaagcacttagcatatgccaggtactgatcctagagctggaagtgcagctggaaataacatgcagttcccgaccttagagtacttatggtctagtatgataagaatattaggaacacaatttagtctattcaatgttaagacagaattaaatttgtttatgccagacattctttataagtactagggcctgtaaaaactggatttctgaaaaataaaataacaagaaaaagtcagtacatttttcagtctataaaacctcttggagagtagtgatgtgtattgtgtgctttggttgctgaaaatatgtgagaaacaaaaatcaataagttaaactgttggtggaaatgtaaattagttcagccattatggaaaacagtatggaggttcctcaaaaacctaaaaatagaactaccatatgatccagcaatcccacgactgggtatctatccaaaggaaaggaaatcagtatgttgacgatttctctgcactcccatgtctattgcagtactcttcacaggaggcaagatacagaatcaacttaagtgtccagcagagggtgaatggataaagaaaatatggtgtgtgtgtgtgtgtgtgtgtgtatatatatatatrtgtgtgtgtggaatatcattcagccttaaaataaaaaggtaattctgtcatttgcaaccacatagatgaacctgaaggacattatatcaagtgaaataacccaagcactagaagataaataccacgtttttactcacaatgctaaaaaaaacttgcaagttgctctagcagatgtcgttactagagccaaggaagggagagagagggggacagccaaaggcttgttaagggatgcaaaagtatacctagccaggaggaatacgttctaatgctctatagtactatagggggactatattgacactttatcgtgtattttcaaataactagaagagtggattttgaatgttcccaacacaaagaaatgataaatgtttgatgtggttgatatgttaatcaccctgatttgctcattacacaatgtatatatgtatcaaaatatcacaggtaccccataaagatgtaaagttgttatgtgtcaattaaaaataagaataataaaaccaaaatcaataaattgagtaatttgttagaggcaaatgcccatatatcgtcaatttaatcagccattccttcactgatgtaacagaaacttaacagtcatgtgttatgtgttataygacagactcagtgttaggacagtaagttaagagatgaagacaaatgaacatgtggaacaayaatgagactgattttttgtactggtgaccatgggcaagtgacttaatctttctgagcctcagtttcctcagctacaaagtgagattaaaagtaacgatacgtatctcatgaggttattttcaacattaaatgagatgtttttatatatggagcgcctggcatagtgcctggatccctgtagattcttaacaagtttcagcaatttttccaccctgctattatagaaaagaaatttgaggctcagtgcagtgaataacttactcacccgggacactacatacctagaagataaattaaacccaagcacatggtacaaagtacatgagtcttgtttgagaccagaaagaaagattaattctgcctatggagtctgagacagaatcagggaggaatatttaaaccaattccatggatgacttttcaggtattgtccataaatacatatttggagacttggagcaaagtttttaaaaagtccatcaaccgctgatcccctaracaccagcagatcctccatctggtctcttcctcactagcatagcttccttcatctttaagagattatgctggttaatctttaatgacaaggatcaacaccagtttctcaatcctgacctttttataattttcagagctagcagatgagaggaaatagacgaaataactgccttgatatattctgctagcatcactccctctaaagtaaaaagagtacttctttaaaccatgtaactttgccagcacagttgaaaccaagaacttctctagaacttgagtgtcaaaatgactcattcattatttactcctccacaggatgtttattttgtttattacrtgacactgtccacaaactggaagcagattttcagtggaaaaaaatcctcaaagtaaaaccctgagaagattattaatcctaagaaggataatctctttctgattttctttgtgtaactaaaatacctatgtaactctattttaagaaataaggcttaccataaacatractaatgtttatgatacacaacaatatgtaaaaattatcttagcataactttattgccaattatctgaatataacctccatctctttttattctgtttcattcaacagaatgctacagctttccatgtaactgtccaagatgataataacatcgttgtctcattagaagcttcagacgtcatcagtccagcatctgtgtatgttgtgaagataactggtgaatccaaaaattatttcttcgaatttgaggaattcaacagcactttgcctcctcctgttattttcaaggccagttatcatggcctttattatataatcactctggtagtggtaaatggaaatgtggtgaccaagccatccagatcaatcactgtgttaacaagtaagcatcatgtgtaatattgtcccgtttcttcttattgttcccctgtttcttcccgtagggctcgaattgacagactccacccagaatggcaaaatcacttgccttaatgccaagtgacgtagattcaaagttatgagctatattaagaatayagctgaagtttgatgtttactctttaccttgtgataacaaaaatatttttaaaccmaaaaaagtaaacctcaatgatgtagtatattttgagactgagtaacaatttcaaattcatgattggaccatgtaattttctgctatgttgcttaataatgtcatcataacttgtttakttttttccagagcatgtattctcatrttaagcaattcagtttggggacaatgaactgatactcctatttaacctgctcaaattcaggtataggtctttggctgagagagagaaaaagatatatttatttatcaattgttattccccacctcatcttcaaaatagctttgccttctacttcttaagaaaaaatgccaagaaaaaaaattactggcattttaaccttcattagtccatgtcataaagagttaaggctgacattgggaaatttttaggaatacttttaactccatgtgattttttttcactttactcactgactttaatatctaatctcaaattaagatgtgactctactgtctatgttgacmtgtggaagaaaaactgatatctgtaagacagtagagtttatcactagcacaatataatggctcagcaaagtcccttttgcttgtgttctttagtgtaagttttgcaacagctgcaatttgttaaatgccatctatgtgtgattgttctggtgataaatacgtggaaagacagtgatattatctgttgggataaaaggaagcagaaactacaagaagcaaaaactcagaaccaagctagaggacatatttttaacacatctctcaaaaattaattaaagtctccattggcasaatcccaggatcagtagtgagtcctaaaaattaggaatggcatagacccaagaccttcaaagtttatagacataatgaacagatctactagttgaattaaagggagaacttacctggtaaaatactgtcttaaacaagctctagaaaaagatgaattgcaagtcagatttaggcagcagatataggcacataacgcctacaatacaaactccttaatatcaaaagctctgtcttacttatcttcataatttcataaacacctagcccaagccttatgcttgcttaatagatgatccataaatattagtacaatttagttgagcaagtaataggagagacccggggggaaaaattaaggcacaaagaaaaatagatttaggactgtaatgacggtcgctgatccaacatttatgagcatgcactcagccattcctcatcagttgcagctgaatgattcagccctttagctaactgttcatgaagaaatttgataggtaagcaatgctaaaaaatttctagaatatcacttagcatttgcaatgagttccattcaaaatatattctattttcctttgtgatgtttttctttgacctgtagggcttacaagtgtgttgaatatccaaaaatttggaaattttgcagacatcttttttcactgattccttgaggaagtgytgttgtgatcagagaacatattttatatgatttcttttacttgaaaattgttgagatttgttttatgggtccaaatatggtctttcttgctgtgtattctgtgagcacttccagggtgaagtttcaataagtaccgaccaggtcacgttgattgttcaagtcttctatgtccttactgattttctgtctatttgttctaataatgactgatagaggaatctgaaagtctccacttgtaactgtaaatttgtctatttctcctttcacttattttggtttatgctttacatattttgaagctctgttgttattaggtgcaaaagctttcaagattgctatgtcttcttgataaactgacccttttgactatatgtaatgtmcctctatattccaagcaatatgccttgtgttaatttcccttttgcctgatattaaaatagccatagttttcttttttaagtgtttgtgtggcatacctaatccacccttttgctttcagcctacttctgtctttacgtgtaaaagggtttcctgcagacagcatagagttgagtcttgctttttttttccaatctaaaaatctttgtcttttaactggagtatttaggacagcactatccaataaaaagagaatgttaaccttatatgtaatagtagattttctggtagacacattaaaatgctttttaaaaaggtgaaattaattttaatatcatggtttacttaatccattatattcaaaatattatttcaacatataatcaatatacatatttacacattttttactttcatacataaatttaaatagaaataaagttgcactagcctaattttaatcgctcaatagccatatgtagctagttgctaccaatttaaatagtgcaggtttagacaatatatatgtaattattaatatttattattataatataatacaattatttctatggttgaatttgaatttaccatattgttaggctgtcaggtagaacagggagtgagtcgatctagtcaatagttgagctgggtttaaggtattagacacctttcgttcatcacagatttccagttcttcccatgataggctgccaggagtggtagtgggtatttctcagtgtttcagtttcaccctcagtatgcagcaagccctgaacaccggcaccacagaagagctyccccagcaatagactgctgttgcttttcactcattgctaactttttggtggggacagaggatgttcttcgttctcgtggtccagcctcaggcttaggcagaccctgtgatgttagatgggacattcttgacatttttacccctcaaactacaccgacactgaaattctacattaaatccatgggtcagagagattcctgcctcttctccagtggtagcagaaccactgatactctactttgtattagtgcaggactctggtcccaaaagagtttctgctcctctcccaggaacaggcgtcttttgtttctattcatccttcaaaagaagggatattttcctgagaactagaaaggaaagatttttctgcccctccacaatacattaaggcttctcctttgtattcaggaaaggtccagggaagtaagttttcttgctgtcctcttagtggtttcaattatyatctgcacacctgtcacccccatacccccatccccagccccccagagggaggctctctctagtcccctatcctgcctctggtagtcctcatgagcatggggtagaggcccaaggggaaagctagagagagacagtagactctgtttgtgtctgtgtctcccagttagtctagaccagtggtgacctagaactttgggatgatggaaatgttctatgtccatattgtccaacatagtagycactaatttttaattttaattagttttagttcatttaaaatttgatttaaatagctctatgtagctaatagctamcatattggacagagcaattctttgcatccatttagaccatactcagcctttatgaatccattaaactcggagctgctttcttcttatctgcttcgatgttgtatcctcttcctgctgtgctttgccaaaggtgaaatagtgtgtcgcctctctccagaggggctggtcactccttcgaattcacatcacttggttcacttgctacctcacctctcctgtaacctcaagaatagttatgatttcgtgaattatgtggcttttccttgttgaggtggagaagaagtgatgttgtcctggggctttctacatcttaaggggaagagaaaacacgtattgatttccaaagagtaaaattaattcatgatggtctattaaatattatcttgtacctcatttttaaaggttcaattacattatcccaaatttgaggggcaataataggttgggaatatcagaagtgggaattagtgcacaaatatttctgtgacattaggcatgagctggcatttggtgacatttgggtttcagcttccaccttcataaaagagggaattgaagtacatgatgactaagataaattttgagctctgaaactaacattatctgtcagttaatgatgtgtttttgccatctttatttttctaactgaaagctttttaaacaagtttggaaaacatttgtagtatctgctcacagagttgacatatttctcctgagaataaaagagtacctttatagcagtcatttattgtgtgttagatgcttgtcttgatgaaataagcaatgacaaagcaattggccccagggcagtcctttgatatttcactatagttgttctgagtctgtcactcttagagaaagctgaaaaacatggcaaagaataaatttggcacagcagagtcatttggccagttcaaaagaatttcacaacccttaggctgtgacatgtcattaatatttaattgattgagaaccttcagtatattgcctgcccttcagagggaaggggtagtttctcagcacgtaaaaggatgcctggaatcagttccttggaaattgaggaaatgtcacayacacacagctgtgtcatgtgtcagtgaagttctacagatagtggctgtacacattaaagaatacacatagagacactctacaaatataatattctatacagtcctattctaaataaaaataattcatgaatttttattttagttatcaggtacattctctgtgccatgtcctaggtaccaaagaaataaagatagataaaaatactcataatcaaagatgttatactatagtggaagagacaaataaaaaccattacaaataatatgataactgctattgtaaccagaaaggggtcacaatccagacccccaagagggtgcttggatctcacgcaagaaagaattcagggcgagtgcacaccgcaaagcaaaagcaagttcattaagaaagtaaaggaatgaaagaatggctactccataagcagagcagcccaaggactgctggttgcccatttttatgtttatctattgattacatccttaacaagggggtggattattcatgagttttccaaaaagggkggacagttcccggaactgagggtttatgccccttttagaccatatagagtaacttcctgacattgccatggcatttgtaaactgtcatggcactggtgggtgtctcttagcatgctaatgtattataattagtgtatagtgagccagtgaggacaaccagaggtcagtctcatagccatcttggttttggtggggtttggccagcttctttactgaagcctgttttatcaccaaggtccaccccagtaggtctcagccttattttacccagtccctattcatgatggggttgccctgttcaaatgcctctgacactgtgaaagaattatgtgaaagagactgccttgccttcctagggagcactgggaaggcagcacagaagaaacaatcattgaaaaataaaggaaaatttgccacaagaatgaagaaaggaaagtgttacagagtcaaatggaatcgtatatgcaaataatggaggcatacatagcatggcacacttgatgactgcagaaagttaagatggcaagtgttagctgttccagaaaataacaagaaaggtggctagaaatgttgaagaactttaagtaccttgcagaggaatttagactttaacctataagtgatgagggagaaattacataataggatttgaatggagaaagctctctcttgtagcaaagctgcaagccaagagatcctgaatcctgcattggaatagaaaaattatcaagcaagtatttggggtagtagttcaatcatatgtatagccttaggcagatgattactttctctaaatcttagttttcaaatctacaattcattctaggggttagcaaactttttctatgaaggcttagataataagtgtgttatgctttgagggccatacagactatattgcaactacacaactctgccgttgtaaacaacagcagccacacacaatacataaacaaatgataatggctatattataattaaactttatagacaccaaaattttatttttttatacaattttcacgtgccatgaaatactattcttttgtttaggcacaacatctaaaaatgtaaaagcctttcttagctcaaaagtcaaacaaaaacaggtggcagggcagatttggccttgtggactgtagtttgctcacttgatctgtcgtatcattataatatgtaatattgggataattagagtgcctacttggtgggggcattataaaataatataaagtaagygccttaacaaagcatgcagtataggatcaatcaagataagaagtatcaatggcattaaatagaaagttactcaaggtgtcagaagtgaaggagattgagacagattgggcagggaaatatcagtgagaaggaggtgactggtttaggacaaagattctgactaaagtgagaatatcaagtaccgtacagacattgaaattttgagcagaaatgaataagaatattaaggtgagaatggaggcagggagaataatttagaaagttgttgaaatgttcgaggaaagaaatgatgagaacttgaactaaggtactggatgtgatggtcaccacctcacttggactgtgggcagctggtgttgccagacctacctcgctggcctgctttgatgtagctgagatgccaggtcaggtctcaaatsatcatctatgcaccaaacagcagctctggcctcagtccagtctcttttccctgtgcctgccatcagaagtgagggtctaatcccagatcctctccctcaagagaactgtgccagaagagacacattcttcagctggtcacatcagaggttactgaacatgaacacaattgcttctttagtttgtattctttagtccagctaaacagagcaatctcagaaagaagcaactcagcagttagcatttaataagtaatacatagctacttttgttttctttaaacaatatgtgctccacatttgtttgtatttcttgtctcttctccgagatagtcacatccagaactttcaaaactttcctattcatgatctctcttgaatgattcaaagataattaaggggcataaaatattgttcaatttgaacatgagttttcattatatgagacacctaatgagggaaaaaatgatcacactaaatgtcattttttattaaagaaaaaactaggaacttatgctaggatttcttgtcaaaatatgcagtccattcttcttgtcatccactttttgctcctaccacaaagmaaaaagaaaagcagaagmacatttccagacacaaagccacaatagttctctaagaaccagaaacaagataaaaactcaaagcagggaaatgggctgaagtaatgggccctctgtgctctgggtctggaaaagacactattgagtctgggccccaatatagtcagaaggactgaaatgctccacgctagacagggcacagagccagcctctctgcttacagcaaagattcttcctgtttgacaaacaaacaaacaaacaaacaaacaaaaacatacataaagacctgaggatgcaggagacacatattcatcttactaccgaggtccaaggctagttactctctgactcagtgaatgaatctatagtgataaccactatatcatccacaatattaagaatggcaaaataatgtcatatgtcttgctgtagactgggtgctttggtgggctgagaggatgcaatggcttaattatttttaaaagcaaggcataataagagagaaatggggagatgaaaaagcatcaaatgagcccagagcctgtgtctcaaaacacatgaagaacttatgctaaaaaagatagatatcaaaacaacgataacagttcagattatattttaaatagcaatttaacaaaaatttaattatgtttataatgttcaaggacataaatgtaagaaccacctccagtttttgaaaccagggaattagtgggaaaaaaaattggcagaaatagtgcagtgctgtgcctacagttccacctaatcaggaggctgaggcaggaggatcccttgattccaggagttcaaatcaaggctggacaacatgatgwgaccctatctcaaaaaaaatttgcagaaataaaataaaaacatatagaataaacatgaataaattaaaatttttataaatgaaaacataattatttaaattaatttaaaatttaatgcatcaaactaggtaaaattaatttgattgattaaatttaaagtttactaattgaaaagcttcagtagataggacaaattctatactgataaaagttataaagagctagtaaattggaagataataccatgcaatttgcctcataatatagcacagtgaggcaattcacaggcatggaagtgggagaggctctagctaagaaggcttaagaattcatgaaaaagaaggagggaatggtgggcacaatatttggagagatgattatgagaatttccaagacttgaaaaatgayatgaattcacagactgacagagcattccaactaagtacctaatagagtaattcaaaactaaaactacgcctaaatatataatgctatattattgttattatatatcatcagattactaaggctgaatgaaaatagataaataagcttgaaaggtacaagagaaaaaaagcgaagtatctacaaaggaatgactattctactgacagaagtcttcccttctgcaataactggtgaaagaaaacaaaaaaacaacatcttcaaagtactgaggaaaatacctgtctacctagaattttatacccagatacatcaagaataaaccacattaagaataaagataaaataaagaaatcttctaatatacaaaccctagagaacttaacacctatagctctgagttaaagaactgttaatagatagatttcagcaagaaaaaaggtgaatctagaggaaagtccaggacacaatttwaaaaaatgacaatgggaatatggtatatgacaaagattgtgttacaaattagcaggagaagatggaaaaagaaccccaaaacaggcaaaagaatttaacaattctaagaaaaggaaagctgattgaccaaaaaacataagaaaaaatcattaatctccatgagcaggaaattaaaacaaagagataacatttcacacacctcagagtggcaaaaattaaaaagactgatatcagcgaaagttggaaaatgatatggagaaagaggaactatcatacactgctaatagatatgtaaattgccctaatctatttctaatctaattagaaaactttctgaggctagactatctgacacagatgatgtgtagacccttctattcaggattttcaacctaaggcgacatgccgcaaacatttattgcagcattatttgtaagagtgaatgattaaaagcaattactctactaaaagaataacaggtatattgtgtaggttatatagttgcaaaacggacactaaaataaaatttttagacgttcttgtatcaagagtgataaatcttaaaacaatgttaggcaataaaaacaagctgcaggatagttatgataatttacataataatttaaaacatgaaacaatgttggatgcttacaaatatataagtttaaaaaacatgcatgagaagataaataccagattcagagtaataatttacttctggtcatggtgggaaaagaatggggtttgggtaagttacaggggggaatttcaaatatattttctaatactttatttatttgaaaaattaaaacatctgtggacaagaaagtaatgaacaaagatattaagtgattcaccttgtccaacaactccatttctctgtccagtccaggctggtcataagaaaaaaagggaagtacaatggagtgactgacagggcaaggactatcagcttagattaggatttaaccttgtcatcactgaaatacctgttagtaactatagctctagttcataccacaccacttaatttctaaaaagaaagacaatgagagaagtcactggagagatagtaaaatatttttagactatacgtttgagttcttctaaaaacagtaattyttgaattgaatactcctcagtgatgcttagacatcaacaggatttactgctgacctgggtcatttacactgaagctgagggaaacataaaamaaacatacaagcaagcattttaagacattctyttagtttaaagtttaagtagcytgttgcagaaaaaaaattggaaaataaaatatctgttctctaatcctcctgtctgtcttgaatttcaaagtttgaccgtggctttgatgtgcagacttcgtgcctcagggcatgaaagattgagtgcccttctaacttctcttttcagtagaagaaaccctgatgaggatgtgaaacaggactgcagcagtgaaggagttactgctccgtggctactttttctgtctcctttcattttagttctcttagggtcagagtcaatagctggatctggtagactccatgggttagtaaattaggctgggttgaaaaaaagaacttgaagcagttcaaaacttctttgggagttttgaactcaaaacagagttttcaagggttggttgattggttgacatggtacgtaagtgagttagtgagttcattcagaaatgttaccttcatgtaggaagactagggatgagacaaagataaaattcaaaccttttaaccagactatagcacatagtctacagtgacatgatcataaaatatactggagtctgaaggtcttcctaacttttttgtagatgctgtttttcagaaaactccaggaaaaatcaaagcatgaacatgtagcttcaattatttctgggtttcttaaagtcaaaaacaaagatagattaagaacctgagcaacaaaataaaatacattcagctacagattgagacatactagatcctcaatagttatttattgaatgaactaagtcaaatttggagttctcatgttattgaaattgaaattttttaaatgtaaagtttaaactaaggacatttctttaggtcagcctatagatgatgtccaagaattctctcaattctaaaastgtgaatcaaaaatttttttttctgtcaacctaaaatcgtcaaaagggtcagaatctcatttaaagagagttttatcaagcacaaagtgtgaggctggaccacctggaaacaccaactccaaaagaattcagtcagtgctctgaagtagtgaaattgggatctcatttctataggcagaaacagagaagattttatcaggattacaaaaaaattattcatataaggatggcacctggttacagaaatttcattgattataagcagtgtttcttttggggaagggtacatttaacatttttttacacagagtgtaatagttatttataggttttctgtcatccagcctaagcaaagcaggacaasaaaggggggaagttaatctacaacawgggtcattaattaagaaggcaggagatttttgtccctgacatcatttaattccctctagtcactgcacagaacaagaaaaatgaagtgagttaatctgtaatttgagaacagaagttataactatatgtgactcagatcacagttacrtcttttggggttccaacagcttttaaattttacttatgttcatttttcttttctttttttgttttttttttttttttttttgagatttcactcttgttgcccaggctggggtgcaatggcgggatctctgctcttggcaacctctgcctcccaggttcaagtgattctcctgcctcagcctccccagcagctgggattacaggcgcgtgtcaccacacctggctaattttctatttttagtagagacagggtttctccatgttggtcaggctggtctcaaactcccgacctcaggtgatccacccgccttgaccttccacaatgctggaattacaggtgaccccaaaccaaattatttaacatatcttcttaataaaattcatacaggtaaaatctgtttaatagcttctttagaaaggtgcaaaatgcattatttacaagaattttgcaggagagtgggagggggaggagaggcaggcatatatcgatcatggattttaaaaaatgagtatttttaaagttttccagtgaatgaactactcaagcaaaatagaaatgttttctttaaatttctacagaaagagtggtttgataaacaccacaaaacatatgttttacaacattggacagtttaaaattttatacttcatatggaaaaataagtgctatgttcacaggaagaaataaatgatcatataactatcattggtctgagccaaaatttattttctgttactggtctgttactgatatcaaatttcctttgcatgagaaaaagaaaaataaactaggaatctggagatacagactgtcatgtacttgttaaattaccttggacaagtaatttagtctgtgagtcatcattatatttataggtgggayggagatattttatttgctcttcctagatctcaggactgttgcaaaaggaaaaataaatgtaaaagttcttcaaaaagcagaaagcaccatataaaatgtactttattaattactgctaagaacattcaattcatggttactgaggagtttagtgcccacagacagtgaaaattatgcgtgaatttctggtaggtgtaatccttgcttaattcaagtattgatatcggcctttctctctcctctttcttttccctttctccatttacttcacttctgtagaacctctacctgtaaccagtgtttccatatatgactataaaccttctcctgaaacaggagtcctgtttgaaatacattatccagaaaaatataacgttttcacaagagtgaacattagctactgggaaggtaaagacttccggacaatgctatataaaggtaagcagcaaaaggaaarctgaatcaatgatgaccctcactttttacaaagcttttcccaaatgatgttctctcttactgcaaagaggttttataattcactatttgacctataaatgagccattaaaaataattattgatttatgaaaatcgtgttatgaggaagcctagaacatctggttcattacttgagagtcgtgtgtcatgtgttcagcatgagaaatactctcattattgtcacttacatgttactcttccctaaggcagcatgcctggtgcaggaaataaattcagacttaagtttagaagcacaagtaaccgtttctttctgggtatgatagatgggcatttctgggactgggaagtcagagtggtgccttttgcaaagtttcacttggagatgatccaacatcctcaaatgcaatgctgtatgaccagctaaatgcatacattaacatacaaaaattagtttcgctttttcactggcttgatgggaaccttgaggggaagggagagaaaagagcccaggagaagtaatatttcaaattactcaaaggaacaaaatcaacttctctgggtggaaggggctagagggagagggaagagagggcattcagtttcatttgggagtgaatcctagtgaaggaacttgaatacgctcagggcacatcgggtgggggtgggaggtaggtaatgatatcagagttggctgactgtaactggaaacatgtattggtggaaagagaaagtattgaagcacacagagcatgacatccaggaaaatgtcattttcacttgctgcttttacacactcatttcttcaatggatttagtttttctgagacactatttaaaatatatgcagtggggctgggagtggtggctcacgcctgtaatcccagcactttgggaggccgaggtgggcagatcacttgcgttcaggagtttgagaccagcctggctaacatggtgaaacaccgtctctactaaaacatacaaaaaatctagccgggcgtggtggcgggcgcctgtagtcccagatactcaggaggctgaggcaggagaatcccttgaacccaggaggcagaggttgcagtgagcctaaatcacatgactgcactccagcctgggcaacagagcaaggccccatctcaaaatgaatgaatgaatgaatgaatgaaatatatgcagtgaatttggtttttttaaactttgaaaaaatcaaagaaacacaaattccacaaagtattatgttctttatttacaatgaaaacagataatctgcaaattaataaatggaaagttatttgtttatagatcacatgcaaatatatttatgaatgattaaaaagcaattactgaaacttttgttaacaatcataaattttaaaataattaatataatcccattcttaagtcaattactttttcaaactatttttagatttcaattcaataagtggtacttttagttttgttctctcatttcttttgagttggattggatttttagtttattgttattctctttaaagttttctaagtggaatccaaacttttattatttctttttttgggcaggttctgtctgcaaactggcaaataaaccagttttaaattaggctagtttttctaaatgaaaacttttcttggaaaattgctctttttttaggtcataaggtggcaaaataccttggatttttatcttaaagtaaatggccagtgtaaacttaacctctacaatttctttatattatctccttcaattaatacataccccaaaagttcctatcacaaaaaggttaactccaattgtgtttgatctgcttaggaattttgtcagaaaaagcccttcaggattgagtctagacattcaacgtttcrtctctagccttctactaactctttattactgcccataacagtagttgaaggaaatattattttgtgaatgtttagccataattgtttcaaactttccagaagtgtgtgaygtttagaagaccatatttttcatgtaattgattttctcttcacagatttctttaagggaaaaacagtatttaatcactggctgccaggaatgtgttatagtaatatcacctttcagctggtatctgaggcaacttttaataaaagtacccttgttgagtacagtggtgtcagtcacgaacccaaacagcacagaactggtaagtctcctgaagaatcaaatacagtgaaaaaataattcagttatattttgctgtacatttattttttatcctaagaaatattctgatccagagcaaagaaagaaaatatatatgtttaataacctaaaacagattttctatcaatataaaaagaactgggcaaaatattcaataagaaaaatctaaaatatgtcaatgtaatcatagatttctaatctttgaataaaaagctactatactattaccaaaggttataattaactgacttacccagatctagyagacatcagttattgctgacaagtgaccctatggcagaaaacagagtgaagacattctagtacagattatcagattattaaaggaaaatattgaaattcaaatgtatctaaaacttgcggtgcttgattttagtagcaccactaatatgaagcactattgtaggatggatggatagttgcatggatggatggatagatggatgggtggrtggatggatggatggatggatggatggatggatggaataatgaatggataaaataagcatatatctactaagtacccatcaccaatataagcaaaatcgtatgtgcctagtatgcctgaatactcaataggaatgctggagaggccattctgatgagcatcaggaagggattatgatagattacttctaaggtcttgacaatttgaaattctaagatgtcatgattcttattcattagtctaagaccaggaaactatttcagctaaatcactaattcacctaatgtcaacagttaagattctatttatgtttttcattattcaatgtaagtagaaaaacattaattgagcaccttctacctggaagttgttctcagtactgagacatgaagacaaagactgatgagacaggatccttgtsctcaaaaattggtactcataatacacgaatggcactaacacaaggcagaatgagataaatattataacagaggtacaaagttatttaacaacacaaaggaaggagagataaatttttattagaagctcatggggcctagcacggtggctcatgcctgtaatcccagcactttgggaggccgaggcaggtggatcacctgasgtcaggagtttgagaccagcctagccaacgtggtgaaaccccayctctactaagwatacaaatattagcygggcatggtggctggtgcctgtaatcccagctactcgggagactgaggcaggagaactgcttgaacccaggaggcggaggttgcagtgagccgagaccacgtcattgcactctagcctgggcaacagagagagatactgtctcaaaataaaaattaacaaaaaagttcatggaagaggtgataatggaactgctatttgaagaacaagtagaaactgttacaggcagagactacgcagtgcgtcttcataattttctccctgtaagtaaagtgtgcttccataatttgtaaactcattttgagtttatatgtttcattttagagaggtgaggagtgaagctatatttctaacatgtgtgttaacatctctaaaggcaacacatgtatgcaactcttgtaggtgcaactatgtcacatggagtattttcatcttcatagctataagtacactatacttgttttgttttggtttttttgtaataaaaatccaggaacagagatacattttttgtaagtggaattacgataaactgaaaaatatttatatactctgcttttagaagtggttgaattaccacttcaacaagcataatattgtaagttaatatatttgaagtgtgactagtggtatgttgataggtatacatcatccacaaaatgttagaagtatgtatayggaaaaaaacacagcttatcttgatgtaaatttgtctgtgtatcagaagtaaaattaaattccacttttaaaaatctgcttgtgtacctgactcattaagagattaagtattcactctaattgaattaaaaaatacttgaaaatgaaaattctctctcttacagccccttatccacctcaaaatatttccgttcgtatcgtaaacttgaacaaaaacaactgggaagaacagagtggcaatttcccagaagaatccttcatgagatcacaagatacaataggaaaagaaaaactcttccattttacagaagaaacccctgaaattccctcgggcaacatttcttccggttggcctgattttaatagcagtgactatgaaactacgtctcagccatattggtgggacagtgcatctgcagctcctgaaagtgaagatgaatttgtcagcgtacttcccatggaatacgaaaataacagtacactcagtgagacagagaagtcaacatcaggctctttctcctttttccctgtgcaaatgatattgacctggttaccacccaaaccacccactgcttttgatgggttccatatccatattgaacgagaaggtaaagcagtaggaaatcagaggaaataagaactgatacaaaggaaggggaattgaaatgtttttaaatttgagtttagaaagactgatcatagacagttattagtcaaagaataatggtaatgaaaggggagaatttaattgagtatccaatgcagactgagagcagaaaacccaaatgaatagactggataagaatcagaaggtttgggtgattcacaagttgtaagtactgccaactgtatacatttgactgcccactatttctcatgtctcagaacaatgaggaaaacatcatatttggaaatattttgaattaaagatctaactatcccagaatattacaacataacctagagaaattttctgttttctcatatgcaaatttttaaacatggcagcaaagtaatacttatgaaaacattactacttcctcaagaatatgaggcatgtgtcctgctaaccagccgctcttgttccctttagggtgygcccctctagaaaaagcaccacagttttccaaagagaagctgatagtaaaatggaaaatacacagctgctgacatttccatatagctactatattatattttgcattgactaactcagsatctgaggttcattctttatattttagccactaacttaggaaagtagagccatgactttcaacaagtttgggtcatgatacctatctcaattgttgtttggtagatttttatggttatttgttgtttgtttagtttttacagtaatatacttcattttccattttctgatctagtagtttgagtggcagaggttataatttgtaaaaatttgaagttacagtgatagccttatttttagggtgagagtttaaggcccatgtagtctcatatactgacatattgtttactcctattttacttaatagcatgagatacaaaatctgtggattcttctatacaagatgatacagcattcaaccatacccaaatattacataaaatgaaaattcttaattatttgagtcaaaagtcattttcctggaatttcctattttttttaaagtttccttaatctatcatttatttttctgttcctaaatatgttcctacggcaaataggatcttgtcattacaaaaattttttactgcctcttctcatgaaggttctattatgcatttatctgactcagtgtcttcttttgaaggctgttgtagtcaccaactgatgataatgacttcaaatgaagtaataagcagcagaggatggatggactgtgaagcaatgtgaaataattctttctttaagaagatctgaaagcaaatggataaaggaaaaatattaccatgattattatttttttaattttactttaagttcaggggtacatcagaaaatataccttaaaaattagatgtattttaaataaatgttaaagcacttctggatggttaatactaccacaaagaacttacaagatatttgatcctggttattttttagcccttacctcgtgatgagaaagccaacaattgttaacttttcctgattatctacttctattttgtacacataattttgttgggtaggagtacataaagatacacagtgtagacccatccctagttttattgatttgaatgccgtatttgagttttgttatttggaagactgtaaaaatactgaactcttatttattattctttaatggtacctttagtttagaggtgtaattgaacttgacaaaaggagggaacatttaaaacacctaattttttttcattaatcgacttgtctatacccagggcctttccaggtgtctattcatgtatcttctcttttttatawatgatttagagaactttactgaatatttgatggtggatgaagaagcacatgaatttgttgcagaactgaaggaacctgggaaatataagttatctgtgacaacctttagttcctcaggatcttgtgaaactcgaaaaagtcagtcagcaaaatcactcagcttttatatcagtaagtaacaaagagatcattttacacttactggggagctagaacaatggaactggtgggattaatgatgctcagatgtcaattattcacaaaccttagggatgatgagaagtcttcaagatcaggagaggctgagatccacaagctttggatagcagaggaaatgaatgcttgtttaatagtagcaatcctatccaggggtttaacttgaggattttttttttactattgtgataattgaacatttattaaactgacctttcacattagccataacaaagcctccaaggatgtggacatacagtttgggaaatacgacatttgtttgagcccataacgaaatgatattataggactgtgaaaaatctcattagagtattgagcttgtgaggctcaaaagaaagacaaagattcaagtgtgggtacaccccgatggtctcaataaaactggtggaaaaagtcatagctagagcaacctgaaagtcccagtgtcaagtcctagggtggcctctaccattccataagggtaacaggacagcaaaagctagcctctgaaggttgcacaaacagtgcctgcctctataacgtgtttagctaaactgactatgtttactggaagtatagaggtcaaaaatcagtaacctaccctatcaggagttatatgtgcctccgatcagtagaaagaaaaaccagaaggcaaagaataaaaattgctttcagaaaaggataaccaccacatatcctattgccatctggaaaggcaaataccacctttcgttgaaggacggatgagagcagaagaggagctcagcttatgtagcagcttaaaaatgttgaaaatatcccagataatatttttacttaaaagaaaaaccaaaaatgtcacctctggcaaaagaaaggccttaaagatttatcagatgcgtagaaagggtattcccaactgccttgtgtgtctttcaagtgtgagagaccttggacatgtgattacttaagaaagaggacaaagtcgagtatttcattcttcccataagactaaaaatgcctcacttaccaaatagtttctttctgcaccagtacagatccaccgcayatgtgaacagcctccacgaaaactccacaacaattctgktctttctgacttttctcttctctgaattcctattctgtctcatagtagacagcacaaaacacataacttattagtgtgtggtatttttctagatttattttatgtacatcttgcttctcatgtcaagttgtaaaatcccaggctggagttatactgtttgcatatttattcattcttttgtacattcaagaaatatttatggaaccacttatatctttcatgcactctgctctattcttagagtatctaaagcgactagtgccattgagaatatgtcggaattgctcaaaaatgcaattactttaaagagatgcatcttaatatttatctagaaaaatataggctcctagaagttttgttttttctctgttgctaaaagaatgactttttaaggagattctgttctgtggtaatgagctattcagatgtaccatgtatacttctttggtttaaaaaatggataccgcagacataaatacttacacctaactgggtaaatgagcaaaaattagggtggcttacgtttgctcagtataatgtagtcacacaccagcaaaagtatatttgcagcctgtttttcctgaccaaactgtttcacatattctggtgttgagctgttacattacaatttattatatgtttatgtcgttgcattataatttacatttatgtagctttgaatgccttcccagagatgagaattcaggtaggaatttgcactagactgccaatagccttatgaagaaaacacttttattacccccatttttcacattaaaatacatactgaatcgcagaaatttcagtgacttccccaagtgtcaaaattaagattataactcaggaatatttgataacaaaacccattttcatttagcctgccatgacycatgtccttgggttgattatcaagtcagtcataaggtaaaactattaaataattgaatttgttttgcttactccaacctccrccctctgtgcccccactacactagtactcttcagaacagtagtaacacttcacgtttatgtagttctctaacacatattatctcatttgatcccaacaacaaccttatgaggtaaattaatcagattttcaaaagcaatgactcaagagacaggaggtctgggttaggtcacaagcacttactagctctatgacttcaggcagcttgtttatatctctgggcctcagtttcctcatcagcaaatgtgttagtccatatttacactactataaagaactacttgagactgagtaatttacaaaggaaagaggtttaatcgactcacagttctgcatggccagggaggtctcaggaaacttacaatcatggcagaagacgaaggggaagcaagcaccttattcagagggtggcaggacagagagagagagcaggggaaactgccacttttaaaccattagatctcatgagaactcgctcattgtcttgagaacagcataggggaaaccacctccatgatccaattacctcccatcaggtccctccctcgacaagtggggattacaattcgagatgatatttgagtggggacacagagccaaaccatatcagcaaaataaagcagtgggtctctaaagttctcttcaattctaaaattccatgatttatccatttcacagatgcaatgactgagattcagagaggttaactcatttgtccaaagttgcaccactaataatgaccaaactgagtcttagtgcaattatcgtatctccaaatttttactatttcatagtgctccaggaagtctcatgcagggttgagagcatggattttggaatcagacttcctgtgtgtgaatcctagctcgacttactctatctctacctcagttttcacatctgaaaagtgagatttaataaaagtacttatttcattggcttgttataaaagttaaaggggccaggcacggtggctcacacctataaccccagcacttagggaggccaaggcgggcggatcacctgaggtcaggagttcaagactagcctggccaacatggtgaaatcttctctctactaaaagtacgaatattagccaggcatagtggtgggcacctgtaatcccagctactcgggaggctgaggcaggagaatcgcttgaactcaggaggtggaggttgcagtgagcctagataaggctgcactccagcctgggtgacagagtgagactccatctcaaaatwaataaataaataaataaataaataaataaataaataaatmaggaatgaaatacgtaacacataaaaacttaaagaaggttatatgctaaaaaacagtttacatgctgaaaagcagtttatatgtgagcatccgtgttttaagctcaaccactactgtgatgtcctagacatcttcccaagagaactacggtagcatccttgtgtctgtggtgtcactgacctgccaggaacaaacgtataaatatgtaatgggttccatatctctttactataattactatcattttgtattatcatttcccttgcaccatttacaccaaaccttagtctgtcctccccagtagagcsacttgctccttttcctctcctggatctcagcttaggaatacagcatcaaattaaggagctgagaatgcatcctaagcaaataaatggaagtttcacatttgcatttcagcagggaatttctgtagataataatcaccttaacatgtcttgagtccttactaggtgtcaggcactgtgttaagaaccactttaggaacataagagaacaaagctaaggatgggcacttctgtggagacattttatggtaaggatcctgttgtgttcctcaaattatcrcccaggttttagccagcttctttaattgagccagcctgttgtgtgtttcttctctaatataatcacagcctgccttttcgttctcactgttgccaaattcaaatgtttgcacagggtagtagtcgaggctgatttgaatctcaaagtaattattcctagagatcaaagatcctagtagcaaaggaataataarccctgatgaaatgccacaytgccacgctcactctttgttaaaagagaagtaagttttctcwggtgaagaatttaccagratactctcacatgcacacgatgattgaagtgrcacttttgtttctgctgttattgccgaggctgctgtttagatcaaggtgaggtcaaggagtagagggttgcagctgggcagaggacctgaagagttgccagtccgaccgccaatctttctttgaatctcattgtaagggcaaaaagaaaacatgattttttaaaccrgaatcttttatctcaatcagtgtaacgtgcagcctcccctgtgttccaatttgaaatgtgcaggtccttcaggagagtggattgaagaactgaccgagaagccgcagcacgtgagtgtccacgttttaagctcaaccactgccttgatgtcctggacatcttcccaagagaactacaacagcaccattgtgtctgtggtgtcgctgacctgccagaaacaaaaggagagccagaggcttgaaaagcagtactgcactcaggtaaaggagaggaaatgagaatgggctcgccggtccttcctaagcacaaccttacagggcaatgccaaggaggcaattgtaggaagccaggctgaggtctgctgggatgggtgtgttctgtgactgttcccaagagccagaggggccagaaatgactggcaatggctttttgatggcactgtcatctccctttctcttcagaggagggtcatgttctttttcattcattattcaagggaatttgctgagcatctatgatgtgccaggttctaagatagatgttrgaaatttttaaacatcctgctcttgcagagcttgtaatctaatgagaacaatagataagtgaacatataatgactgcactgtatrgaataaggcctcagcttaaaatgaatgatgagagtccagaggagttcacggaagaaggagctgagcgtgagtaacatggatgaaggggaaagaggatttggaaactggttggaaaaaacatcacagagcaggagacaaccaagcagagggttggagggttttttgtttgtttgtttgttttacttttttccattcttttaattttcatttttactgtaaaagtaacgcattcttgctgaaaaaaaaaaaaacttaaaaatgtaaagaatataaagtaggctgggtgtgggggcwcacacctttaatcccagcactttggaaggccgaggcgggtggatcacctgaggtcaggagttcgagaccagcctggccaacatggtgaaaactcgtctctactaaaaatacaaaaattagccaggcgtggtggcacgtgcctgtaatcccagctactcaggaagctgaggcaagagaatcacttgaacccgggaggtgggggttgcagtgagccgagatcgcaccactgtactccagcctgggcaacagagtgagactccgtctcaaaaaaaaaagaaaaaaaaaaaaagaatataaagtaaaaaactaccccctcaccagtcacaactgaaaagagctttgaagaatatatgggagacagctgtgcacagaggagagtgaggggcaggcagagacggtgtgcaactcagtagtcctgtgagtggctagcagaaggaacgcatatgccagaccaaaccctagtgaaacygtgcaactggagcccagagtggaccttgctctcaaatgccctgagaacctggggcccagtcctatatttctaarttctggccttatgtttttacaaggtcaaatgtggtggttcttggtgtcttacaaacacattttcttccctaaaggcaaaaggaaaaaartaattatcaattcktgtggagtacgttggaaatgtaatgcacagaaaagatgtttgctgtatgacagcaatttgggatgtttccattcctcccaggaaaattaagcatttaatgaaattcaaacaatgataaattgtaaattgataagatgaattcaggaatcgtgttctttggagcactagaaagccatagaatgcttgagaatgaggtgccccttgagttgaattaaattaaggaataaatatgctaaaccgattaactagtaatcacagttcattgtgtaacttattagcttcctttcctgagcatacccaagatgactgactcattacattgacagaaaaacgtgttttcccctacagaccttgacctagaactcaactgcttcaaggtacatttctccccttgccctacttaatgtacacattatatatctttcacataagaatamaaaggctaaaggtagagayagatattgtaaattatcaatgagccagaaaagactagtccaaatgtacttttacaatatcttctcaaaatgcaaataggaaaacagaacatgaaatrtcctattcaggattataagcaagaagaccaatatttaaaggggagtgcaggaaagagaccaccatgctaggcatcatctcagttaccacaagacctttttgagatttgtataatatcataccactatagtccattatgccactaaataaatgtgtagaaaagcaccaatggaaagaagattacataaagtggaaataagaccatctcaggctcaaaggaacctacactatcatctagttcaaccctattatttaagagtccatcatatacaggtgcagtggctcatgcctgtaatcccagcactttgggaagctaaggtgggcagatcacttgagctcagaagttcgagaccagcctgggtaacacagtgaaactctgtctccacaaaaaaaaaaaaaaaaaaaaaaaattgcctatcatatacttacttcaattagctatgctgtctagtacatttttctccttattcctttagctgaagaggaatagaactggtatccatttggagggacattggactcaactaaattctcaggaatgaagattaagacagtcaggaaaaatattgggatgctaaatgagtggaaattaagggggagcagagtgtggaagtattttgtaaaaaataaaacacattacttaacatgcagaatgcagaggcattccacttttcctactccaacacacacccaaggaggtccaggagaaataaaaaggcatggagaaacatagaagtgtaaatataggttagcagctcagtaaatattcagaaattggggaggatggaaattagtgtttttaatttattaccaagtcaggtaatctgtaatccaattacccctttgtcattttttaagtaatatgatgtatatgcccatagctacttcttattttaaaaagtataatatccctaggataaatttattataatggcatatttttgtttgtttgtttgtttgtttatgagacggagtctcgctctgctgccaggctggagcatggagtgcaaagtcatgatctcggctcactgcaacttccacctcctgggttcaggcgattctcctgccccagcctcccaattagctgggactacaggtgcacaccaccacacccagctaatttttgtatttttagttgagacggggtttcaccrtgctgaccaggatgatctcgatctcttgacctcatgatctgcccacctcggccttccaaagtggtgggattacaggcgtgagccaccgtgcccggctataatggcgtatttaaacagctatgattccaggtagtcatttgaatagttagaatcaactcataaaatattatcaaaagaaaggaaccttaacatcaccatgaaacaatctatactccttatgccctttattattctaaacattctaaataggcaaaatgggtgattaatgagctaggtcagcatttacacttatagtcagatgtctacaatgtgttaagtttaaatggakcaatgtttttttgtttgtttgtttttggggggtttattgagatggagtcttgctctgtcacccaggctggagtgcagtggcgtaatctcggctcactgcaacctccacctcccagtttcaagcgattctgttgcctcaacttcccaaggagctgggactacagaagtgagccaccacgcctcactaatttttgtatttttagtagagacgggttttcatcgtgttggtcaggctggtctcaaactcccaacctcaggtgatctgcccaccttggcctcccaaagtgctgggattacaggcgtgagccactgcgcccagcctggagcaatgttgataatataacacattatatggyttaatagcatattatttatgtgtatatgttagaagaaggtctagaagaaggcatatcaaaatgtcaggatttgtgggaggaggagaacaaacaagacttccaatttacttcatttgttcttttattgggtgagcaatttttacaataagcatatatgttgtatcatataaagtgtattttaaataaataaaataatattgcttagttgtggataatatgcatcttcttatcatagtttgtctctttagaaaattctctatcaggccaggcacggcggttcacgcctgtaatcctagcactttgggaggccaaggcaggagaggcacttgaggccaggagtttgagaccagcctgaccaacataatgaaaccctgtctctactagaaacacaaaaataagctgagcatgatggcacacacatgtaattccagctacttgggtagctgaagcacaagaatcacttgaacccaggaggcagaggttgcagtgagccaagatcgtgccactgcactccaggttgggcaacacagtgacagagcaagactatgtctcaaaaagaaagaaaagagaagaaagaaagaaagagagagagaggaaggaaggaaggagaaagagaaagaaggaaagaaagaaagaagaaagaaagaaagaaagaatgaaagaaagaaagaaagaaaggaaggaagaaagaaagaaagaaaagaaagaaagagggagggagggagagagggaggggggaaggaaaggagggagggagggaaggaaggaaggaagggaaactctctatcagatgaagagatatagttgactaaatctgcctatacggcttccagcagaattaaaaatctaaaacttgtgcaagaaaccctgatatgaaagagtataaatatgaaagaaagaatgaaaatcccaatttattaattcaatataatcttattttgtttaagtcagtgggaaataaattttggtatatggctccttttacttacacgcagaggaagttgtaccaattcagattacataatttctactgtgtataatcagtttccagtgygaaaaggtttaaaattcatatcatatcaccagttctgtatgaatccttaaaatcttaatgggactctaaaaaacaccttacagcatagataagctgtaaacaacattgttctccattgattcatgttcctccttggagtaattccacaattttatgtatccaaaaggccaaaaagttaataagatgaataaagattaatatttattgatactctggtttaaacattctcaaactctatgaggtatataattttattacctatatcttagcaatgaagtaaccaaggtaagaattttaattaaattataaagcataaataaacccccatgctaataatgagtagagtcaggatttgattccaggtagtccaaaaaaagaatgtgtgttctttccaccaagcaatactgtcttaaatattagagacactgaaggtcaaagcagcaccttaascttttagttgaattatcaattcttgtgtgtgccaacattcaaatttaataaatgcattttattcatctatacgttctcactatttttctctatatggtatttgttacgtatccaaattttttttaaaaaaagcaggrccaagtgtggtggctcatgcctgtaatcctagcactttagaaggcccaggcacgtggatcacctgaggtcaggagtccagagaccagcctggccaacatggcgaaacctcgtctctactaaaaatacaaaaattagctgggcgtggtggcccacaactgtaatcccagctactcaggagcctgaggcaggagaaatgcttgaacccgggaggtggaggttgcagtgagcccagatcatgccacttcactccagcctgggcgacagagtaagactctgtctcaaaaaaaaaaaaaaaaaraaaagaaagaacagtaaagaaggtctcatgtaaatgagaaatgttctctacaatattattttagggggctacaacagcctggcagggtgcttaccaggatatctcgatgcttagcacagtgacttgcccatagtgtagattaaaggtcccaacactaggcttccagtcccaacactgcatctaaatatatgaccttggccattctctggctttactttatttattaaatgagcactttggactaggtaatctctaaggtcatttccatttatttatttatttattttatttatttttyatttttgtttttttgagagcttgtctcactctgttgcccaggctggagtgcagtggcacaaactcggctcactgcacctctgcctcctgggttcaagcaattctcctacctcagcctcctgagtagctgagattacaggcacctgccaccatgcctggctaattttctttgtattttagtagagacagggtttcactatgttcgtcaggctggtcttgaactcctgacttcaaatgatctgcctgccttggcctcccaaagtgctgggattacacacgtgagccactgttcccggtggtcattttcatttctataattagatattatatgcttctaagtgacaagagactaaagacatttcygtactgacctttgtatgtaatcagctgacaccacaatttagaatgtcaaactatcctcatggtattgctgatttgattatggttagagrctgatgtgtctctagtgtgcatagttataattgacactgatgggtataaagcagttcacagggcttagaacagacaaaatttgaatcttctaggttcccttcaatgttcacataaactataaatcatcctaattttggaatctgacarcttcagtaaagccttctggatttcaaagtcatctgtgattccaaaaagagtctctgaatattataccagcctctgtgtaacattctgaaatcccagctctaaataaatcttattgggtgtttkgtttaaaggtgaactcaagcaaacctattattgaaaatctggttcctggtgcccagtaccaggttgtaatatacctaaggaaaggccctttgattggaccaccttcagatcctgtgacatttgctattggtaagttgctagccacaagaagaatgactgacctatatattagggtattgacggaggggtgcaatgtgcgagctcaaatcattatcatcgtatttggaaggtccatattagttcatccaatatgctaccttcagagtaataaataacaagaattgtatacttggaaaacattcttaatatttattacttggggaaaaaatcagaggcaaacattcttactttagttttcaatgattatacaacaagagtaaagctgtgtgccgtggcacacacctacagttccagctacttgggaggctgaggtgggaggactgcttgagcccagaagttgtttgttttttttgttttgtttgtctggttttttttttgttttktttttttttttttttggagacagagtctcgctctgtcacccaggttggaatgcagtggtgcaatctcagttccctgcaacttctgcctcccaggttcaagcaattctcctgcctcagcctcctgagcagctgggactacaggtacatgccaccatgcctggctaattttttgtatttttagtagagacggggtttcaccgtgttagccaggatggtctcgatctgacctcgtgatctgcccaccttggcttcccaaagtgctgggattacaggcatgagccaccacacccagccaagcccagaagttttaatctagccttggtaacatagcaagaccctgtctcaaaaaaaaaaaaagaaaagaaagaaaagaagaaagaaagaacgaacgaaagagagagagagagaaagaaagaaagagagaaaggagaaaaagtgagaaagagagtgagaaagaagagagtgagaaagagagagaaaaagaaaaagagagagaaaggaaagaaagaaaagaaagaaagaaagaaaaagaaaagaaaagatgaaaggagggagggagggaagaaggaagggggagggcagggggagggaggaaggaaggggaggaagcaagaaagggaggaaggaaggaaggaaggaaggaagggagggagggaggtaggtattgtatcagagagtgaaaactcgggtcattaagtagaagtttgaggccattgctaagacattccttcttaactttctttttctaccccctgccctcttctttctagttcccacaggaataaaggatttaatgctctatcctttgggycctacggccgtggttctgagctggaccagaccttatttaggcgtgttcagaaaatacgtggttgaaatgttttatttcaaccctgctacaatgacatcagagtggaccacctactatgaaatagcagcaactgtttccttaactgcatccgtggtaatcttcccttaaccaactgtcagtctttcctatgggaacaggcaaacctttatgtaccaaatgtgtctttaagaaattatctataaatttgattattttgtaaatacacatagtgtgttagttcattttcacactgctgataaagaaatagccaagactgagcaatttacaaaagaaagaagtttaattggacttacagttccacgtggctggggaagcctcacaatcatgacagaaggcaaggaggagcaagtcatgtcttatacagatggcagcaagcaaagagmgcttgtgyaggaaaactccctcttataatagccatcagatctcatgagacttattcactatcacaagaacggcatgggagagacctgcccccaggattcagttacttcccacasggtccctcgcacaacacttgggaattcaagatgagatttgggtgagaacacaaccaaaccatattattctgccccttgcccctcccaaatctcatgtcctcacatttcaaaaccaatcatgccttcccaacagtcccgaaaagtcttaactaattaactcgaaagtgcacagtcaaaagtttcatctgagacaaggcaagtcccttctgcctatgagtctgtaaaatcaaaagcaagttagttacttcctagatacactcggggtacaggcattgacacagctgttccaaatgggaaacattgaccaaaacaaagaggctacaggccccatgcaactccaaaatccactgggacagtcaaatctcaaagctccaaaatgatatcctttgactccgtgtctcacatccaggtcatgctgatgcaagaggtgggttcccatggtcttaggcagttccactcctrtggctttgcagcatatatcccccctcctggctgcattcacaggctggcattgagtgtctgcagcttttccaggtgcacagtgcaagctgtcagtggatctaccattctggggtctggaggatggtgaccctcttctcacagctccactaggcagtaccccagtagggactctgtgtgcagtctccagccccacatttcccttttacattgccctagcagagggcatgaggtccctgccctgctgcagcaaacttttgcctgggcatccaagtgtttccatacattttctgaaatctaggtggaggttcccaaacctcagttcttgactcctgtgcacccacagtctcaacaccacgtggaagctgccaagccttggggcttgcaccctctgaagccaccaagccttggggcttgcaccctctgaagccaccacctgatctctacgttggcccctttcacccacagctgcagcagctgggatgcagggcaccaagtctctaggctgtacacagcacagggacmctgggcctgggccacaaaaccacattttcctcccaggcctccaggcctgtgatgggaggggcttccatgaagatctctgacttgacctggagacattttccccattgtcttggggattaacattcaactcctcattacttattcaaatttctgcagccaacttgaatttctcctcagaaaatgggattttcttttctatcacattgtcaagctgcaaattttccaaacttttatgctctgtttcccttttaaaactgaatgcctttaacagcaccaagtcacctcttgaatgctttgctgcttagaaatttcttctgccagataccctaaatcatctctcttaagttcaaagttccaaaatccctaagggaggcacaaaatgctgccagtgtctttgctaaaacgtaacaagaatcacctttgctccagttcccgacaagttcttcatccccatctgagaccacctcagcctagatttcattgtccatatcattatcagcattttggtcaaagccattcaacaagtctctagggaattccaaactttcccacattttactgtcttctgagccctccaaactgttccagcctctgcctgttacccagttccaaattgcttccacagttctgggtatcttctcagcagcactccactctcggtaccaatttactgtattcattcgtttccatgctgctgacaaagacatacccaagactgggcaatttacaaaagaaggaggtttaattgggcttacagttccacgtggctggggaagccccacaatcatggcggraggcaaagaggagcaagccatgtcttacatggatggcaccaagcaagagagcttgtgcaggaaaactcccccttacaatagccatcagatttcatgagatttactcactatcatcagaacagcacgggaaagacctgcccccatgattcagttatctcccactgggcccctcccacaacacgtgggaattcaagatgagatttgggtggggacacagccaaaccatatcacataggtatggctattttcaagtttttttcattgtttttgcttttaggttttgggattctcttttgttttgagagggagagaaagagataattgtgtgaagctagctgtcaactctaattgaatgtatttgttaatcaacattttttcctaagcacagaatagagcaatcaagtgcttactgcttctcctggatcctggggaggaacacaaagagatttccctttggcattccatagttagttgacactgcctaattttaatgatgacttttcatggcatctacagatcaattaaatacctctaatgtcaggcttttagaggatgttttttaagaaaacaggtaaaaattgctctttctgaaattgagataattttgaaaagtgtgggttacccatgggctattcacaaagtacacaattaccctctacccagttgaagactctgaaggactcctgttcgtggtttacactgaaaaaacactgarttgtgagaggttacttgtcttagaaatagggagaaatgtatgtacagtcacttataaataaggactgtttcgcatgtgtaatattaggaaattgcaaaatcaaacaaatattggaaatctttggctctatatctttaaatcacttttaaaaatttatatttttgtattttactttatgtctcatttcattctagaaagaatattttattatagtaaatttaggaaacacaaaaagacaatataaaggaaaattaaaattacttattaattttttatgaaagtaagtctactccaaaaatagtactttctcccacagtyttttgtctccttgcttgcttttctcattcagagaatagctaatctgctgccagcatggtactacaacttccgggttaccatggtgacgtggggagatccagaattgagctgctgtgacagctctaccatcagcttcataacaggtgaggcatgtgtggggaacagttccacaaggagagagcattattgtgaggagttaccaaggttccaaatctctagaaagtgccagtcattcacccagcactgggtgagcatcaatttcatgggagataatattgattctgatcattcattattttgtttagttgataatctttagaaatcaaaataccatttttattttgtgttaccaccgttgacttatttttattctgaggcactgaccttgattaatgtactctccggctgggattgattagaatagaaatatggcaggcacagccatcagcttcacactgcacagtcgattgattttacccatatgatgattatatttgttagagtgcctccattttcttattaattaagccatttttaaagtcataggctgactgtagtagggtcccttgtggaaattaaaaaatagggtttagagacagatagatctggatttgaatagaccctccgcataccacatataaccttgagcackttaacttttctaaatatgttttttttaatgtggaaaatggggatgataatagtatcagttatctgttattatttattacaacttcattattatataagctactttgcaaaatacacgacacaaagtttaagcacttaaaaaacaattagtcttagatcctcggaaaccttaaattatgtagttgcatcatcagtagtcagagatagcaatgaaaaggggaaattcatcaaagaaacactaacccttgtggtttgaactaagacgtttcaagaaccttttatcgaacgacaaggttgtaattagagttgtcctgagaaaacagaggagaaaaataccgcttagaggaataattttggcaaatagtttcctcagtagacatctagtttactctgttgaaatgtatgagaaaaaaaaaaagtggaaagaaatcaatcatctgtgaattcttacacaattaacttacataagcatgtctcttttctttactagccaatatccagagcactttttgttccagatgttaatagtaatattagagcagaaaastgaaagaatacccaaaaaggagaaaatagcagttacttggcaagcgctgttagtcttttgcctataatgataatcacatatttaattataagtaaacttcactgtatcaataattcttataatttaactatattgatgtaaactttctgagaatgctctttccttctcaccaggacagttgtctggaaaaagctcagatgtaacatctcaacctgggactgctcaattccagctgtcaaactttgaattatcttaacgattctgggcttctattttctcaccggtagaaccccctaaaatgtcagctaaataggcactaaagcctacttagagacaactgattagtagagcaaaacttaatatattgaacaccaccctgacagtctttgcactgtcttttaagggggaacaaaagaaatgaaatattaataggatttggcttcctggctcaagtggtttaaggtatgcctttcaagatggaaaactgactaggattgggcatagtttataacagtttaaatggacatagcaagtgtggatcaataaactatggttaatagacaagctacttacctggtaagcagtctgttgtcaccaatgtattgatgttgatgattttctatcttttcctgggtcaaataaataagtgatgctgaaccagcagtctacaggtattgtctcagcatattgacagagatggtctcaattttcacatctataaaatgggtataataataataaatacataataataaatacctcacagtatgtgtgagaattaaatcatgtaatgtaagtcactattataatagattattgtcwtttttatacttattttctaaacatattgaaaattctagtaggttttwttttaaccttcttttttttttttttacttttactttaagttctgggatacatgtacagaacatgcagtttgttacataggtatacatgtgccatggtggtttgctgcacctatcaacctgtcatctaggttttaagccccgcatacattaggtatttgtcctaatgctctccctccccttgcccccaccccccgacagttctcatgtgatgctaatacttataacaaacattcataactaggtatgctttcaaaaataatcattcactgaagaatttgtaatatataaagtaaaaacgcgtgtgtgtgtgattttttttaccttcttatttaaagcaaataagaatctcatgcttaactttcctatgctttgaattttccaaattgtgtggtgtaaaagaaaataggaacaaaatatttgaattaggtgtgatttattaggaactcaagtctaccatctttgttaggcaattcagttggctagccctcaatcatagtaattatgcggaggggccaaagtattaataaacaaatagtgacatcttgtggccttccagcaatatgctaggttttaaagcaacaacatggaaataaaaatctgacatgtgagaggaaagatatatacttctgggtttgcaattttaaagatgtttcttttcctcactaaaattaggacatgagaaaataccctttgaagaaatatatgcataggttcttgtatatgacgaaatatgttggaatatattaggaggctataaggaagccaaggttattttcctttagtagaatattctgaaatatgatgtagatttgtgttacttgttagatgcattgatgatctttcaagattttattgctaagcatactatataagtgctactcgtatttcacatgaaacaaatgcatttttacttcatatattacaaattcttcagtgaataattttgaaagcatagctagttatgaatgtttgttgtaagtattagcatcayattaggggaaatgattctttatagaaaatttccatagattttagttgacattgtgctgtatctcagaatggaacaccgactgtcttcaaaccaacatacacctggaatttaaattcaattgtgtatttgttttttaaaataatcagagttagcagttactttaaaaaggtaattaaaatgttttcagagcctatatagtataaagcttgtgatgaattctcttccctcgttggcaaattttttattttatttatttacgttttttggctgggcgtggaagctcacgcctgaaatcccagcactttgggaagccacgatgggtggattgcttgagcccaggagttcaagacaagtctaggcaatatagaaagaccctgtctctacaaaaaatataaaaattagctggatatgaaggcctgtacctgtagtcctagctacttggtagactgaggcaggagggatgattgagcctgggaggtcgaggctgcagtragctgagattgcgccactgcactccagcttgcgtgacagattgagatcctgcctcaaaagtaaaaataaaataaaataaaagtaatttttttttttgaggcagggtctcactctgtcacccaggctggaatgcagtggcaggctcatgcctcactgcagcctggatctcctgggctcaaatagtcctcccacctcagcctccctagtaggtgggacaacagggtgtgccaccatgcccagctgaatcttctaatttttttgtagagatggggttttgctatgttgcacaggctggtcttgaactggactcaagcgatccacccacctcagcttcccgaaatgcagggattacaggcattccctgcttaaatttttaaaaatttaaatgcataagatgataaagtagcaagctcagtgttagaatttagcttcgtggctaaaaaaaaaaaaaaaaaaaaaacttgttcttcccttctttctctctctcactactcactcagcaacatttattaagagcctgttttctgcaaagcactgggctagacactgtcaaaaataatgtcttgttattttatgcaaataacatttgtcttctatcctgcttgtagtactatgatcttctatcttcctacccttgtatcctactgttctttattcccataaacacctttgctgcaagtaaatgaaagagacttagtttrcaggactctaagttttttaatcctacttggctaataactccactgatacctattaatattaattggttgatgtaacaaaaatatacccaaacaagtgaactttttaggaattttgtaatggtgacatttatccaaaagactttgatatcctcaggtacagatgggtctgggggtcttgtatcttagatatacaagatgtgggatcccattaaacaagtgcccatcctgtatcaccatccttcactgttattgagaggtcctgaagttaccgggactatcgtgtgctgtgaattctaattcgctaagttgactctatatgggatttcatgctctgctgrtaagtactttatttatccatctattatactaaattgtgcctcgtttctcccttgtagccccagtggctccggaaatcacttctgtggaatatttcaacagtctgttatatatcagttggacatatggggatgatacaacggacttgtcccattctagaatgcttcactggatggtggttgcagaaggaaaaaagaaaattaaaaagagtgtatgtttctttgaatgccagcattgtgtgtctgtaaatttagttttatgaactattgaaaaccactaagcaatcatttattgacacgtcaawtgtttgcataccagttgtctgttttaggctctggagataagacagtgaacaaaaattgaattcttcctttcatagagcttaccgtttaatctttaacagtgagatgtaagagctccaactattgatttcatttatatttagaattrtgatttgagctttttcttcaggatgccaaacattttcaagaaaactacaattaacgtgtttcccattttttcccatatatcaccgacacctaaagatttggggaccttgggactactgatttcttttctccaaaatacgcttttggatgtttattgataaggggacagactaaactactgtaataaagaaacaaacaaaaagagagtggctcaaacaaaatagaagtttatacctctcccatgatagcacaggactaaccaggcacttctgctttaaggggtcacccagggaggcaaattctgttttgttgttccatctgccactatgcatagtccttgtctctagagaggaagctttatcaccattacatgcatgttccagcctgcaggaaggggaaaagaaaagggatgatgtggaagcccagcacttacaggatgtgaactgaactgtcatttgtccatgtgacttctacttacaatccactgatcagagctgggtcacatcatcccctctagctgtaggagaggatgggaaataacaatggctgttaggtaggaagccacacgtctacagatatgggtaggtttcttttgaacgtcttagaatgtacatatcagtagcaactcagtaattgtcttttctaaaacctgttatcaatatgtgagaaaatgtcagaatgagacccattccaaataagggaattcattgcaaaatttttctgatgtatataatgcattattaaggctacctcacattgggcccagctgaggaatttataaaattttcagaagatataacgtatctataatataatcaattgcagactgctgcatagaacagagagggaatgtgtctgctatagtcctttagttgtttggggtggtgcactgattcattcactaaaagtttaaacccttgattttgatgatcttgcaggtaacacgcaatgtcatgactgcaattctcagcttgcctccaggmgacatctataacctctcagtaactgcttgtactgaaagaggaagtaatacctccatgctccgccttgtcaagctaggtaagaagagtrcacagagatgggtgtgaaataatcactaatgtttgcatcattcgattcagcaagagctcctcaattcaatgaaataataacagaaaaatggctaattttttatgagtagaaaatagacatttgtactagcaaaagggtatgttcaacttggtacaagtttctgtgagtgggttgtatactgttctgggaaacagtggtgttcgctgttctttgtaaggttaaagaaaccaggtagtcataggattttggagatggaagcacattagagattatctaatgcagtgttcacaaccctataagacaacattctattttcatattaatattatgtaatgctctctttaatatcttaaatagtaatggatttaaaaatctacatattgattttttaaattttatatagtttcccaactccagaataaaatcaagacaaaaagaaactaatttataataaaataatatggatttcctaaatatatggtcagacacaactactctaaaagacataatgaaattacctgatgcctagatataattaaaatgaataagttggggtttataagaaataaaaagatcattagtccttcatataagaagtataaaaataagcaaagaaatgaacaagttaatataaattgataacaaataactaaacaagcatagatacaggtagatactagaataaaaactagagttaaaataagtactaaaagatgagatatattttcatataatgagagaaagatggaaataattttaattaaagtagggacaacacaccaaaagtttataaatggcagcatagaagcaagctggcttcactcccctctacccaacagaaaaccaaaagcaaatatacactctgagattttcaccagcaacaacccagaactcaaatacgaggatgcgaccgattccagagccatagagaagtgaaaatactctgggcagatggtaggagaatcaggcttccacattcgtgacgcctcccccgcgattctgcctggcaacaagtgtgcagaaaatcttctgccaactcatgtttctacactggaaaaagtgaggttgaggtagtcaactagtttccccactatcttgggctccctggcaggaaatctgtccttgccttaacccacaggaagcatcgtgactgcctgaagggagaaatagcttgaggataggcagaaacaaagagatgagatggaactaccattcccagtcccagcaactctgctctgtaacttggccaaaggagacaccaaatcagagtggctgttcagcagcaccatactgtaggaggtacatttcacaggtcccttgggcatgagccccccagctaactttgacacactgccaggataattcctttaagacctttctttttcaggacaggcagagccaaggcaaatctggacttaaggtgccacctagagctgaaatgtaggcagtgatctagtggtaaatatttgctaggcaaacatagccaataaaagacaaaacaaggcaaggcagacaaaggaaagtggactaaatagttaattatttaatgcaaagacatagttctatgcccataagaaacaacatcaaacagggaactgtgacccgcccacgctacccaggaaaaggacaaagcaaaaatccaatgactgaccctaacaagatggtgatytgtgagctctctgaacaagaattcaaaatacagtttaaggaaaatcagtgatgtccaggaaaacacagaaaagcaattcagaaatttatcagagaaatttttaaatcaaacaaattcttggtactggaaaatacgtttgctgaactgaaaaacacatcacagcagaatggacaaaggagtggaatgattcagggagctaaaagcctatctgaaaatacaccattggaggagaaaaaagaaaaataagactgaaagtaagtgaagtctgactataagatattaaaaaaaaaaggctgggcacggtggctcacacctgtaatcccagcactttgggaggccaaggcgggcagatcacgaggtcaggagatcaagaccatcctggctaacatggtgaaaccctgtctctaataaaaatacaaaaaaaaaaaaaaaattagccagcatggtggcgggtgcctgtagtcccagctactcgggaggctgaggcaggagaatgatgtgaactcgggaggtggagcttgcagtgagccgagatcgcaccactgcacaccagcctgggtgacagagcaagaatctgtcaaaaaaaaaaaaggtattaaaaaaaccttaaaagatcaaacataagaattattagtattcaagggggagctgaataaggaagtttactgaaagaaataataatagaaaacattccaaaacttgagacaggtacaaatagccaggttcatgagggtctgagaataccaaacagataccactcaaataaaatcaccccaaagcgtataatactcagactctcaaaggtcaaggacaaagagaagatcctgaaagcatcaagagaaaaggagcaaataacaggtaaacaagctgcaattcacctggcaacaaactgtacaggccatgaggaagaacatttttacagtgctcaaagaaaaaaaactgccatccaagaataatgtatccagcaaaattgtccttcaaatatgaaggaaagataaagtatttctcagaaaaacaaaagatgaaagaattcaccactamcagacctgtcatacaagaaatgcaagagagttcttcaatctgagagaaaaagacacatgcgaaaagaaaacttttcaaggtattagacctttgggaaaattaaatgcatggaccaacccaggatattctgttactgtgattgtggtgtacaatccatccataactctggtataaagcccaaaagacaaatcttttaaaaataataatagctacagcaacctgttaagagataggtaatgtaaagcatgtaaattgaggcaacaaagtcaaaattgggtggtggagagagatgaagttaaatttttaggtgtggtagttttgcttttgtttctattcttttgctcatgatctaagataagttgtcatctctctaaagtaacttgttatggccaggcatggtggctcatgcctgtaatccagcactttgggaggtcaaggttggtgaatcgcttgagcccaggaattcaagacctcatctctactaaaaaaaaaaaaaaaggaaaaaaagaaaagctgggtatggtgacacatgcctgtggtcccagctacttgggaggctgaggcaggaggatcactttagcccaggagattgaggctgcagtgagctgtgagctgtgattgtaacactgcactccagcctgcatgacagagcaagacccccatcttaaaaataagcaaataaataaataaacttgttaaatctataagattttttataagccttgtggtaaccacagcacaaaatcatataatcagttcattaaaaataaaaagcaacaaattaatacataacacttaataatcacttaaccacaaaatatgaagagaggattctcaaaacaatctgaaaacaggcaacaaaacggcagtagtaaatccgtacttagcaataataacactggatgtatatggtctcaattctcaattaaaagtcacagtgtggctgaatggataaagaaataagacccaactatatgctgcctttgagaaacccacttcacctgtaaagacacacagggactgaaagtgaaggggtggaaaaagatattccatgcaactggaaaacaaacaagcaaaaaagcagatgtagctatgcttatattagataaaatggaccacaaatctagaattgtaaaaacagacaaagagggttactatataatgataaagggatcagtttagcaagaggatataacaattataaatatctatgcacccaacactggagctcctaagtaaataaagtaaacattaatagatctaaaggaacagatagacttaattacagtgataggaggggacttcaacaccccactctcagtaacgtatagatcttccaacagaataacaacaaagaaacaacagagttaaactacacatgagacccgataggcctaatagacatttaaagaacatttcacccaactgctatggaatacacattgttttcactgcacatggaacattctccagaatatatcatatcttaggacacaaaacaggtctcaacaaattcaaaaagtacatatcatatcaagtatcttttctgaccacaatggaataagactagaaagtggtaacaagagaaatctcaaaaaataaacaaacacatggaaattgaacaacatgttcctgaacaaccaatgagtcaatgaagaaattaagaaaggaattttaaaaattcttgagacaaatgaaaatgaaaatacaacataccaaaatctgtgggatatagcaaaagccatagtatgagggaattttatagcaataaatgcccttaatataaaaaagtagaaagttcaaatacacaacctaatgatgtacctcaaggaactagaaaagcaaaagcaaaccaaacactaaattagtagaaggaaagaaatgtaaaggtcagagcagaaataaatgaaattgagactaaaaataaatacagaagatcaacacaacaaaaagttggttatttaaaaagataaaatcaacaaacctttaactagactgagaaaaaaagagagaagacccaaagaaataaaatcagaaacaataaagtaggcataataagagacctcataaatacaaagaatcatgagagactactatgaacagctataaaccaacaaattggaaaactagaagaaatggatagattcctgaacacacctaatgagactgaacaattaagaacaagaaaaccttaatgaaccaataatgagcagtgagatgaaagtcataataaagtctcctaccaaagaaagcccaggtcctgatggcttgacccctgaatttcaccagacatttaaagaaggactaatgccaatcctgctcaaacttttcaaaaaagctgaataggaaggaatacttccaaattcattctgtaagataatatgccaagaaaaataataggctgtggataaggaaaaacagatactttaacattcttgcaaatgaactggatctttttgtgtagtgtaatgtcaaaataattctttatattatgacatacagctggaaagtgactgtgtagcatacaactggaaagtgactgtgtaacacaaaacacatcttctacattcaaaaattgaccatttattgcggtatacatttagtttctgatacttatagggaaactcgaagacagtatcctaaaatctgccacagacaatggaggatggattgacacaaagttgtgtgatagacctttagagacagtatgaccgaaagagtggcaacccaaaactaaatgcataatttcaatatgtaattttcacagcagagattttataattttcatatttcaaaaattaagtttatctaatggcaataaaagtgttttccacatagttaatgcaatttagtgacatcattttttaagatgtctgctaatttttgtgtctgaatttgttcataacagtctcaagccatctctgttattacatgtgttcatattagcagctgtaagtaaagactaattcgtggttgttttattagtagcttaaataccatgggtagtattgttgacagtgatgtacttttagaaaaattttagaaaatctaaaaaacaaaaaatacgatctttcctcaatttacccagtaattgcatttctccagaactcaatgcataggtcactgagtcttaaatttctttgtctcctatttgccawgacaaaagctaagtttttgtgctgaaatactttaaaattgtataggtaatttggaaatatgtgatgtgttgattagacactatggaagtaaaaattataatattgaataatttataattttaaatactatcttaattggatttaaatatgccttttcatgacaactttcttctaaattattttacttaatttctttttaaaaactttcaatattatgtagcaaagtacttgcaatttacacttatggtggattttctctggtatgacatttgaaagtcatgtgggatgtgggacatgggacaatttgtcttttggtgtcctcttaataattccaggacggctagcatttctaagtcctgaccacaaaagaacagctaattccctctgctgtgactaataaaaacattcctccaaactttcaaacaccctcaagggggcactagtgccccaattgaggatcaagggttgtctcttacctttcctgcactgaaggcaatctgctcttcctcccttgtggtctatacttaaattctacgaatgtggagagcaccaacttccaactttgcataatctttctattaagaaaaaagttgcctgtctaccaattccagccattatctctgactctgacctctgtgggtgtaaagggccgttcaaaaactcatttccaggtaactgtaattacttgaagattgagctcatattcccaatgtcttcctttttccaagctttactaatacaggaagctattaagtgtttctcaggtcctagcagctttctccaactcatttggtttttcagtctcccttaaaatttaagttcagaggtggtcttatcaaagtagcatttagtgggcctattggatacttcactgaaatttctatgtgacatcatggtcgaaggtgcctcaggartatgagtcaaagtcatgaactagtacaactgtatctacataggactgtgagttaaaaccatgatagtttcccaaacttatcaaaatgtttggagtctccatgtctccctgataatagaatggactatgtaaaccagcttggaaaatttatttaaactttacaagaaggaaagttgagttttcatggaaattatttctagttaatgtaacccttaggatcaataacctttttcttattggtatcttaaatatcaaatggaatattgtttctatcttattcctctctgtagacaagacaatctttttatgatgtgcctttcttattttcttgaaaacatataatgttggtttttatcctttagtcaaaagatctgttctactaatcatgttattgtgtatataagccctttccattttatataacacaatgcctgaacacctataactgcttaacagatactgttgaatgaattgaaattgcggacctcaaagttgaacatagtattgcagttaatatttaatcggaacaagtttaacctttcagagaagtgaaataatatcttgctttagtagtacctgaattgcaggttttgtgtgtgtttgtgtgtgttttttacagaactttcattctagttgttttatgtttcttcccagcattcattttgatatatatagaagtcatagtcattctcctttaaagaaaaatacaactttggcacagatttttcagagcatgtttgaatcagaatgccattgttaaagctggggccgtaactggttgggctaacctgcagtycaatttatctataatagaggcctctttagaatgcctctgaatgactcctgtgtcrtggagggtaggttctacctctatagaaagaaaccaaactaccaatgagtccagtatcatataaattaatctaatgtgtcatgtgcaagggtagagagccctcaaacagttgccaataattctcaacattgtatcatcaataaacatccataaaaagaaatgcaccaataatggtgcttttcccaggatgttgaaccaaccatcccattaggaattttaggttgccagcagtttcacgaaactttggtggtatgtgatgacaggtccctttgacagtcagtcattactatcttctagtcttggtgaatcaacctggatccctgggccaactttaagaggacaygttaagtctacataagataatcagtttcccaaccttaaaaaaaagaaaaagaaaggaaagaaaaaacaggaatgagacgtgttggacacatcacaaatagctctctggtaatagaatatccattcatcaatccatttaactaatatatattaagaaccttctaagtactactcagatgccagagtacttgtggtagtcgtgatggtaatgaacccagagcgctactttcactttctgttcacaaggagcttatgatctagtgaaggggaagatggtaatagtgctgtacagtgctctacaacagggaaatgtggtgcagaatgactgtgtggtcaaagctttctttgaggaagccatggaggctatggtctgaataacaagaagaaccagccacaaaaaggccaagaaggaggatgccagacagagggaacaggcaggcctgagtatagatcttttaaggcatgcagttggaatattatcttcagagtaatgaagggccatttagagaacttaaaataaacagtccgatttacatttaaaacaatccctctggttgcttaatgagaaagggattattgtatcaacaatgaaagtaggggaactaattaaggggctatttgtgccagctttaaaaattatattctaattcaaagaagttgcaagagagtgatggtaactttgactacggtggttgtaatggagatgaagagaagtggacagaattcaggagctcttttggaggttgtgtccacagaactttctgatacggcagaaacacgaagtgagggaaagggaaattaatgactcccaggcttcacccttgagcaactaggacaaatggtggcgcaattcactgagattgagatgactagtaaaactacaggaggaggacatttagggtgaagtaagaatcaaggattcttctttggatgtaaacaaatttaaaatgattattggatatcccggtgcagatgtgaaggccaggggagaaytctgggctggaaatayaaatttggaagtgtctggatgaaatcaccaagtagtaagtaaagacagggaagaaaagagaagccctggatcaactctagaggagccaccccagcagttagaaattcagcttagcaggaagcatcagaaagagagagtggaaaggaacagctaaggaggtcagagaaaacaaaacaaaacaaaacaaaaacagaattgcacaccaccatcatcaaacttatgctttatcctgaccacagacatgttcgggcacgttcgagataaggaatcatataactttagtgctaggagagcttttggagataattcagtgctatgtcctcatttgaacaagctggcgcttagagaaatgtgacacgctttatacattgctaggtcttggtccagaaacagtcatttcgtactttttatccatctgctgcttctattcctggactggggtgtggcctttttccttcaaacttcattttttctattaaaaaatttaacagaacagggaggagcctcatacccacttttgtgactttccgttcctctttggaatttggtcttagggacattggcttgattttcttaatcttactcatacaaacctttatagagattagaaatctttaaaacataatttggctatggacaagaaaaaaatcaaaatactttgaaatgttaagtatttgggggatagtaggctttttctctctgtctctctcaaatatggttatagatacatagaaatctgtaggctgccagtcagctagaaagaagctaataaaatgcttaaggtcttatactttttttaaaaaaaattattcatcctgtgaatcagagaatatttacttagcatttactatatgccacacactattcttggttctgagcatacagaaatgaacaaaactgacaaaaatgtcaaccctcattctaatggagaaaaggagatgataaacataaatataagaatgttaaatggtgataagtgtcatggagaaaagtgaaagaggaaaagaggataggaagtgctgtgggggatgggtgcaatttttgtgaggagtagagtaagtgtcactgtgaaggtgatgtttgagtcagagcctaaaggagatgagggagtaaaccaaagagatcactgggatgagattctgtaggcagaaggaaccacaggtgcccagctatggaagcatagtgttcctggcaagttcaaggaaaagtcaggcaggcagtgtggctgcartggaacaaacaaggtagagagccatagatacagggcagagaggtagcaagggaacagaccgtgtagggtcattgaaaagacactttcctgtgagtgagatgattctccattgcatgctttaagcagaggcgcataacctaacggktttcactgggtcactctggtgataatagattgttcagggcaaggataagagcaggaaggagccaattaggtaatatgaccatacatccctgttgccttagacaataccactttgcaactcttatggattatttaaaaggcagtaatcctctttaggatttggggcaaggcttttctgccccaaaagtgttcccgtgtggacatttttgataaattacatggtcaccttaaagtttagagaacactgagtctgtccagataagagattatacttgtttaggtcagactgggagccacagaggcgatgaaaagtggtcagattcaaaatttattttgaaggtgttgctgagaaaatctgctgatggacttagatgttgtctatgaatgagtaaaagcagcctagagacacagcaagatttgcggcctgagcaattggaaagacagaggtttgatttattaacttggaaaagattatgggacaggctggtttggggcaatgtcagaagttcaggtctgggtgggtcaacattttgaaggttcctatgaaaccattaaataaatactgagcaggcagttagataaaggagcttggattcagtgaagacttcaggactaaaaatataaatttgagtgtaggcaggygacagatgtgatgagttaacaaagactcaataaagaaaaaataatgctatccaggaactaagccctgggccactccaactttaagacatggagatggtgagtaaaaaccagcaaaagagactgaggagcattggccagggaagcaagaaagagcacagaaaagtgtcctgtcccaggagccaagggaagagaaagcctcagcgagtggagattgtccaggtcaaacctgtgaacaaatctggtaagatgaggaatgagaattgaccactgatcttagcagcccagaagtcactggtgattttgagaagaggcatttgggtgccatggtgacgggaaaaaaaaatctaaaatgcacaggagctaaagaatagaagaatccaagaatttttggtagttttttgtttttattttgttttctttaagtgagtgaaaacagcttgtctgtagactaagcaaaatgatccaacaaaacagagaaaactgttgatgcagcatagttagaggtgagacttggtgtgatgtccttgaytggagcagaggagatggaacccggggatccagtggaaggattgggtctggatatatcttcaggaagacaatgacagacaaacagacagtatgggcattaatgggatagtgagcagagtgaagatcatgatagccgcttgtggatggtttcttctgattgacttcttgtaagataaacacatgcatgttctttaggtttgcagggggcaatacctgccatgctactcttctgatatatacctccatggccagcagccccatgcaagcattgttttctgatttaggttctcagtgacagccatgccacagtcccatggctctgtacctgggcctgacactaaccaatccctcgcctcaatatacccctcctcactgcagtcttctgagtgtcaccatggtttgtcaactgcccagaggcataccaaaccactttagtgcttctttttttttttgagacagagtcttactctgtcatccaggctggagtgcagtctctgctcactgcaacctctgcctcccaggttcaagcgattctcctgcctcagcctcccaagtagctgggattacaggtgcgcaccaccacgcctggctaatttttgtatttttagtagagatggggtttcaccattttggtcaggctggtcccgaactcctgacctcttgatctgcccgcaagtgcctcccatagtgctgggattacaggcgtgagccaccgcgcccggcccactttagcacttctctaaaggcatttctcctgcccatcataaggtactgcatattctgcaggtacatgattctctccaatgtattggaagaatctgaaggagggacacatagggcaatgactgtgaagtctggcattgacctaaatacacaagcaagtgcccactctggaaaagttggtcttstaagcaaaggaatttttctggaggcctggtcatccccacttatatgcaactgactgggwaactcrctgattgggaggaaaacaggtgtaataaggacccttgattaggagtccagaggtgtggatcccagttcttkccctcacaaacaaattgtgttaccatagcaaagtaactcagaccctctgaattccagcttcctatctataaaatgagtctgggctagatgatcttttatgctccttcaacttttagaatttcrttccatacctgagttcagaataaaagcagcaagattaatgatgcaatgaaagtgctgatcttattctaagaattttgcaatatatgactcctaacaaaataaaaatgctaagtaaaagcacatgctcctggaaccactgaaaaggaggtattcagatatttgttttgaaactaagtgaagagaatcagaagggtgagggggtgggaagtgggtggatgatgagaaattatttagtaggtacaatgtatgttatgtgggtaatgaataccctgaaagacctgatttcaccactatgcaatctatgcatgtaacgaaattacactagtatcccataaacatatgcaaatttttaaaaatttaaaaaaaagaaagtaatgttaaatgggagctttctctgaaaaactctattgatctttagaagttacttaaggtactaaaactatcaacccatctagtgattcacagaagaagatattatacttgctatctctaagccttaaagaatataggtaaggctgggcacagtggctcactgcctgtaatcccagcactttgggaggccgaggcgggcagatcacttgaggccgggagttcgagaccagcctgcgcaacatggtgaaaccctgtttctactaaaactacaaaaattagctgggtgtagtcgtaggtacctgtaattccagctgctcaggaggctgaggcaggagaattttttgaacccgggaggcggaggtcgctgtgagctgagattgcgccgctgcactccagtctgggtgacagactgagactctgtctcaaaaaaaaaaaaaaaaaaaaaaaaaaaaaaaaaagaatatagttaaaaagtaatgcaaatgacagacatttctaactcctgagaaaattttatttttatatataggaaaaaggcctcataatttaatgtgttttcaggtgctaaatatttgcctgaatttttttttttatttcctggttttttttttaaatgttcaaattacttgttaaatgtatctaggaaaagaatttccctaagtcaacaagacaaggtctaataaacttcaggtctaacaaagacttctgctgtttaatgtaaatatttctctccttaatttcattgcatatcaatcttaactcaccctgaataatttctatacctcttgtttattttcctttcagacagtgctttcttttgcagatgttatttcaccaacttgagcatagtttctgcagtccacactgcttacattgcagatgcttcctttggccaagtcgaatatactatatgacttacgctgcttaacatagagttgcttgagttgaggaaaataaaaataaatttaaaagacttatgacaatatagatgttaacatttatgctttgcatatgaagagcattctaaaaaactgttatcagtgaggctaaagattgaaaataaatgttgttatgtggatcatggattaagataattttaacaatacttttctacttaattttccttattaccaatgttgcacatttgtaaaatgactcaccacgctggtccttatggatataatcttggcctcataaacatcattctctaggcagctaaattaatgagtcacattaaaagaagaaacaatgtaatagctatcagagaaagatgggttttagacaataaacacattacattctgctcctaggctaaatattacatctgactattccctttggaattcctgagaaaaggaagagatttgctgccagagcacagaataagaatcagacactagctcacacttcaggaaggtcactttcactccccagagatcctaggcaacagcttgagcctctcataatccaatctaaattaaatggtagagatggccttgcagccttccagtctgcccatattctatgcattgtacttgattttcttataaaattagattggattctcagtccaaacccggagaggcatggaatgagagagaagaaaagaaaatagggaaggccrgctagttgagtggaacgccagcaatattagaaagcttttagagggtatttaaaagcaaacaaccctatatctatacctcattttatgaaaatggtatgtctatcccccttacccatatacataggtactcacaccaaatatcatggactgtgaagttattttaaacaaaaggaaatttgaccttttggagcatgagaatatggaaaatgttatgattgaaaatgtcatttagagagataaaaagcaatagccaggagatgttccataactaatatctacatgactttacattatataaagtgtttgtgtatgcattgtcttaaatttcatttactcttctcaacattattggttttttcctatccttctgctttagaagactgactgtatttgatattttatagggttttttcatccctcatgtgcagaaagggacatatttggtattttgaatagtaagagactgtattagtttgctagggctgtcatagcaaaataccacagactgggtggcttaaacaacagaaatttgttttctcacagatctggagtctggaagttcaaggtccaagtgtgagcagagtaggcttctcctgaggcttgcagatgatcactttgtaactgtgtcctcacacggtcttttctttgtgcttgtacatctctttactgtttatatttcctcttcctataaggacaccagtctgattagattagagcacgtgctaacagcttcatttaatttaatcacctctttaaaggccctattcatcctgggtgtggtggcttacgcctgtaatcccaaaactttgggtggctgaggtgggtggatcacttgaggtgaggagttcgataccagcctggccaacatggtgaaaccccgtctctactaaaaatacaaaaattagccgggtgtggtggcaggcacctgtagtcccagatactcaggaggctgagtgggaggatcgcttgaatctgggaggtggagtttgcagtgagccaagatcatgccactgcactccagcctgggtgacagagcaagactccacctcaaaaaaaaaaatagtcacattctgaggtactaagggttagggtttcagcatatgaatttaggcggaggggatataattcatcccataacaaagatagaaagcaatcaaaatgcctttgatgtcattgtattccctatcatatgcaattgcctaattaatatttagccactatctactttaatcttgtgcttstgagaatggaaaacatgagtcatgtaaaccaggggtgtccagtcttttggcttttggcttccatgtgccacactggaagaagaattatcttgggccacacataaaatatgctaacactgatgaatcaaaaaaatttcactaaaaatatctcacaatgttttaagaaagtttatgaatttgtgttgggctgcattcaaagccattctgggcagcatgcggcctacgggccatgggttggacaagtttgatctaaaccatcttaggctgtggcactgagctggccttgacttctcatgagaagtgggaaccccctagccagtttttgccagaaatttccagacttctactctaggcaataagaagaaatgctctaactcagtactattcatttgaaacataataagggccacatgtataactttcaattttctagtagccacattaaaaattagtaaaaagaaacaggtaaaattgaattcgatatactttatgtaacmaaatatatccaaggtcatattgttccaacatataatcaatataaataattattaataagatattttattcttttctcacactaggtctttgacattctgtctgtattttacatttgcaacacctctcaatttggactagccacatttcaagtacgcaacagctacatgtggctagtggctgtgttggacaattcacattccgattcttacattttaaaacatttcctgggacagttgttgtcttgagtaggaaaatctaattataagcactcccaattcaattatactttcacttgtgaaatcttgtaatagtaataagttcataattataataacaataaattgtaataactttctttgtttcctttgggataccagagttaaatttctgcctgattaatttagggaagcacaccaatcacgaagatcctgaacagtcctcaagcaggtgatttatgtatgtattcattgacctatagagctgacatgtaaacgtcttccagaaaagtacacagtgatcacaggtgcagggaccttgaaataatctattgccctcatattccacccaaaaagaaaaatttgttacgtggttgttagatgtcccagacctttaggagattttcctgaggatcttatcacctagagccacattctcagccagaacaaaggaaaccctcactgcagtattcatgtcgtattccttggaccactgggagctcttgcagtaattcatgatagttcttgactttgcccctgaaattggataattttacctacataaaaacagaagagaacattaagatacaacctcagcgtgtctggtcttgcctggtgcttgaatcctcctcttttggttgatgaatcttgactcatgttttaaatcagccrataaataagattttttgagtacctataggtggctacttcaaatgaagacaaagtcatttataacacatgacccttgttcttaaagaatctaataggatctactagaatcaggccttcactcacatagattatataggaaataattaaaggcagtagaatgtcagagaagggataaatcattaagagaaagagtcaccaaatgagacttcaaggaggaggtaagactttttcttgaccttcgaatgagcagaataaagagcatactgattgaaggcaaacatgggctgacatagagcactgccctgaagttcagtgagaagactgtctttcccaggaggcaacacatctgtgtgtcaggaatggtggtgaagctggttggatagcatgcagccagtttaagcaggatcttaaagacatggtatgtttggatgtgataccacagacaatgcacagataggatttaacatgagtgaaatggcattttaaggtgattttaatccgttgttgacaaaatgaagaaagaattgattagagccagggaaaaagaggcacagcaagtttgtgatgatcaatgaatgtgatcacaaaagtctagacatgcaatataatttaaaaatagattaaaggaggccgggggtggtggctcatgcctataatcccagctcccagcactttgggaggcagaggcaggcagatcacaaggtcaggagatcgagaccatcctggccaacatggtgaaaccctgtctctactaaaaatacaaaaaaattagctgggcatggtggcatgcgcctgtagtctcagctactcaggaggctgaggcaggagaattttttgaacccgggaggcagaggttgcagtgagccgagattgcaccaccactgcactccagcctggtgacagagygagactccatctcaaaaaaaaaaaaaaaaaaaaaaaagattaaaggaaaaggtaacgagtttttaaaagatatgctctctgggactgagaaataagggaagagcctcagaattgtgactgaggaacaattctgtagtgtgcatttttaaaaaagaaaagcctaggctcagcctaactaatcattcatctatgcccccaaacaacttcacacttggttctatagattcaagttccacatgagtcagaatccctaaaggacataatcctattagcaaaggcagttataaaggaagtgagaagtggaaattgacctctgtgtttcattagcagtcttcctcagagcagaagtgggacaatacaatgcctggaggactggacaattcattgcaagtgaaaaagggctcctgacacctattgtgaattttgcttgcctaagaagaactcatctctttcctccttcaactcttctgcctaaccttgtcaagttgctgcaggaaagaaacatgcttctttttagttggacacaagtttaggagatctgtgataaatcatggcaagaatgattttgacatacttcttggtcctgggcagagtcacaatgatgatattctagaaacaaggttcaaatctttccacacaaagatgtgtacctgtcaaagcagtgaaatggctgacaggactttttcaagcacctctaaaggacaggagctggagaacagacttaggagagtggggcagaaaatgaaaaatccaagtaacaagcaggaagaaacctacaacagtgggtagtcgtctgacaggcgcatataggtggatggaggatgctgttatgtgaacctagcagcaaggtacaatatgtccaaataagcaatgtcagggggtctgagagcaggtaacagggaccccagcttaaaaccttgagttcaggcacagcactctgcatactgggggamctagagggaaagacaacatccaaaagacagggtcacaagcagaagaccaggagacattcaggaatggagaatgagacagcagatgactattagaattgaggaacaggcagggttttttggtctcaagagagcaatgccagtgactcaattactagaaataagtatgaaaagracagacaacacagcttcctttacgaatggatttatttattattaagataaaatgtctaagataaaaaatttatctaatgttttattaatcttcyaatcccctcctatcaattcttttcttaaaaaattatattatcagccaggcacggtggctcacacctgtaatcccaatactttgggaggccaaagtgggtggattgctggagcccaggagtttgagaccaacttgagcaacrtggcaaaactccatctctgcaaaaaatkcaaaaataagccaggtagtcccagttacttgggagtcgaggcaggaggatcacttgagccagggaagatgaggcttcagtgagctgtgttcgcactactgcactccagyctgggtgacagagtgagacccccgcctcaaaaaaaaaaaaaaatgatactatctgtttagctttatctttttaaattttgactaaattttcaagcagccatttttctgtctgaattgttccagatagtttccagagaaaggaagacaggttgttggctaaataccaaactgcatctcatcattagaaggaagcacaccaaatttcatttttctccacctttattaagtgcagatttttgtttctcatccaggaagttctgtattatcagggcaatgctaacttcagtataaatgacacagaaactattaatagattatgactatgatgaaactgaagtagaaaacagaagtgttctgaaaagagaagtaaaaaaatggaagggggaaaaggcaaagtattctgccttccaagttagatagctatctttatgaaaggacatatttcaaaggcaatataaagtctttatggtgctcttacctacctatatttgaattgggggatgcttcacctgcttattagtgaaagaagaaagaatacacttagtaaattaaattttttttaaaactttgtctttgmtcagaaccagctccacccaaatcactcttcgcagtgaacaaaacccagacttcagtgactttgctgtgggtggaagagggagtagctgatttcttygaagttttctgtcaacaagttggctccagtcagaaaaccaaacttcaggtactgtaccttttgatctaccttttctcagttaacttaagtaaggctaattatctgggcaaaataagaatcttctatttctttgagctatataaaatgaaaactgtttatttgctcttttgtgtttcastgatagaaattaacagcaggcttagaccaagcccaaaagttgttatgagaacttttatctttgtctgtatcacttgttcctaattcataagtcactccaggtcagacaaaggaataaaggtagtaggccattgaattgatcaagggaagaaagaccctacaatataaaatataatttaacaaatatgaaccatttgccaagtatataaaggcactgaatagaacacacatgatagaatcaatatttgccttcaaaacatttttatatggtgtagacattgcataagtatagaaaaaagtaaagtaaaatataagtaccacaagacaggtccattcgaccaagagaatttaaaagaaacgtgcatatctagtttgtaagggggacagtcttattgcaaaatgaagactgagagaaggttattgctaaagctctagaattacaaatggcagatacgataaacagagttattcaccaggtcagaatgaatgaaaggaaagagatgaacctgcagttctatgagtggcaacgccacaaggaaaaaatatttcacagccagaagtgaaaggaaaaggacagatttgttagggattttacataatatagtgtgtagactaatactgcgaacataagtaattgatcttttttaaataatgaagttcatgagattgagaagaaaaaaggaatgctgggagtgcaaatcttttcatattgaatgctaagataatttgctttgattcctttctccttttgagattcccttctatgaatgtatctcttgttgatttgtactgaacagctgaattttctctattctaagaatccttttggaaaataactgctctgccaataatggattttcttctctataactacagtgatgccttcctttaagaaaacaatggttagttagctacttactacaactgagtcctgttagcaaaagtctttccttagaataattcttttatagaatagtgaaagagaaggaagtggaagaaaatgctgatggctctcatttctttatgcaagggtgtttcaaaatcttgttttgaaaaaaatgctggctcatcttttgctgttgtacrgtagtacttgtcactagtctggccatgggtccaccaagttagcaacttctttgactcaagaataagttaatactaaatgtttcttagtgcggatagttgccatgttttagtggatgttatataaaagctaagaatgcagacaaaggtgtagtgtccttaatatataaagaattgctacaagtcaaaaaaggtaaaggtcaacaacccaaaacaaatatttcatagaaaaatacagaaatctcttgaacagatgaaaacttcagcaacctcacttacggtaaaaaaaaatgcaaaataaaactacaatatacaattttcactagtaataatgggaaagctcagagtttgcaaatgtatggtactggaaagaatgtagggaggcaggcattgtcacgcattgatgccaaaggtgagtaacttgcaaaatgtctgtagagaactatttttctatagctttcaaaattttaaatgtacactttttgactcagcagttcaaagaatgtgacactagcaaagaatatatgagtatatgtgtatgtgtgtacgttcacacatatatacatattacatgcatatattgtgtgtatatatgtgtgtatatatatgkgtgtgtgtgtgtgtgtgtgtgtgtctatatgcatatgtgtgtgtcttcccaaatttgtgaaatgaagttcattgtagcattgtttgcaatagcaaaaaatcagagaccatttacacattcatcaaccggggctcattaaataaattatggtatgtcctttcaacggatttctgtccagctcttaaaaagaataaaacagcttaatctgtactgatatggaaaaagcaccaaaatatattgatagctaaggtaaaaaaattagcagaataatgtgtaggctaagccatcacttatgttttttaactgtgtcatatatgttcatacatccataaaatgcatatgggaagaaaaataatgcctgacaacatggaataatgctgcttccatggaagggaattggtcagatggggaatggggaaaaaaggaaacatttttcaatgctattctttgtcatcttatacattttttactctgtcaatctattaccaactcaactatgaaatatatttttaaaaaatatagatgaagttaacctaaaatttaycttattttctgaaaccccaggaaccagttgctgtttcttcccatgtcgtgaccatctccagccttcttcctgccactgcctacaattgtagtgtcaccagctttagccatgacagccccagygtccctacgttcatagccgtctcaacaatgggtaattatacacattagtgtataattttctcactttttttgaatatatatatatatatgtatttgtatcaatattccaccaagaaatcccaagcttcggagtcagagagtccttaatttcaatcccaaagtgcacttactagctatggagttagagaaagacatttggtgcctctgagcttttctttcatctgtaaaattggaataataatatgtaactttctgagttgttttgaagcttagaaataaaatacttaaatccttagtatatgctgtctaaatgctagttgctaactcatctcatcttcttcagtaataggcacagtactcttatcaatccaatttcatctatttagccttggtcttcatctgtcacygatcagagaatgacataattgataactgggtcaaagcaagaaagtttccaatccagccaaaagtataagtgggaaaattagaggttaatgaaaggtctggaatgatgctgtttatttccttattcttttcttagttgtattacatgtgttactcctggtttgttagagtctgattctgcaacctgagaccctctatgaagcctcttgtaataaagtcactcataacttcactggtttagttccatttctgtaatattagtcatatatttagctgctaaattcagggatgactggagcggactgttttcttttttctttttctttttggttttctgtttttaatttttgttttttcagaagagaggacaaaaaatatacctgcaaagtattttaatggtctctcattcctacatccttgtacactttctaaaatatacagttgacgatgaataatgagagacttagaagtgccaacctctgcatagttgaaaatccatgtataatttttgactccctcaaaacttaactactcataggctactgttgacctgaagtcttaccaatgatatagacagttgatcaacacatttttgtatgttatacttattatatattgtattcttacaataaagtaagctagagaaaagaaaatgttattgagaaaatcgtaaggaagagaaaatatatgtactattcattaagtggaagcagatcttcataaagatcttcctcatggtcttcacattgagtaggctgaggaggaggaggaagaggagggtttggtcttgctgtctcaagggtggcagagagtaaagataatccatatatatgtgaacctgcacagttcaaactcattttgttcaagggtcaactgtaccttaatgtccatcattccttgtcagctccatgacaatgtagcataacaggtgatattattaaacttatttataaatgaggaaaatgaggcccatagggcagatgaaatggcttctctccaaatagcagtactcaagcgaaaaagctcttctgatcatgcgtccattgttctttctgtttaagcactctactcataaactggagccaagctggcccaaatgggaagtggtaaatacccagaaccttagggatcagatgcacctgctcattctgtgactttatgatcaatgcaaaagatggtatgagtcctcaggcccattttaaagagttttataagaatattaaacctatgttcctgcctttgatatcctgttcttccgtgtagtatgaagaagtagacaatgtgtaagtgccacaggagacaagtctttatatagagtacatgaaaaggacgtgacccctgttcttcagggccctacaacctattaataggttttatctcttgagctgtgcagatggaaaacccctaaacatatggccacggatcatcagaatgtctgcttctagtaatgtgttaagtgcttcagcagatggtagtttgctaatgtctttttgatatacattattagttgtaagcaaagtatacagttgtgctttctgacttcaaaatcatgggcgtaaaataagaggttgccaccctctaagcttgtgaaaatgttaaaaaacgataatgcatgrtaatgacttccacatttttagctttcaaatgaatttaaactgtggcacaggtattcttcattctttagtttccctatgtaagaatatcctgaatgttgtaggcctttgaaagggactcaattcttccagacacctcaataccacttatcagtctagtttgctaagttacagttgaccaggaagaggtcattgctggcttggggaacatgattgttactattattggtatcatcgtaagctcactgcccttaagactagatgaaaagcaatgaatkgttctgtttggttccctgtaagagaacctatgatgaaaatgcacaacttatctctttagttacagagatgaatcccaatgtggtagtgatctccgtgctggccatccttagcacacttttaattggactgttgcttgttaccctcattattcttaggaaaaagcatctgcagatggctaggtaagttaagttttactaatattttatccggaatctttaaaatatctttatctgccatatatatattgtttttgcacacctaagttgtatagcggtatattggattttagttttcagtgtctgtttctattgtgtgtgttttctaaatagacttcgaaacattatattggaaaatattaccattgaaatgagaaagcaaaggattgcttgtttacacaaagtcagacctcttgctatcaatcttggcatttgaagtagcccatatatggagatccattacatttgggtactttcatacacatttggaataaaagaaatatctatgacagttcagtatagttaatgaaaaaagttaataaaaatggagatgacaagaaagaacggggtggggggcgggaaatcctctccataattttaagctgttctattggaaaatatttgtacagtttatgattaggtccattagcagtctctattagttttattcctattactcagagttgcagccagcttagtttttcttgcaattagaaaagcctttgatttatgatttcagctcttccctgttcctttgaccactgatgcattgctcatcagagcacattctcaagtagtttctgtggccccctgtattatcagaataatctatcaattcccttaaaaactgttgcttatttgaatactacttggtttgggaaattttgttaacatttatatttgcccaatattaacctgctgaattataaattaacattcttctcctgtctcagagttctatcactcacatatttataaataaattcatctatccaatagtgatctaatcagtgcctgacatggcatatccaaagaaaaatcagacatcaaagctgtccactaggagcttacttacytaactggatatatgaatagatagatatatttaaaggcataagctgacatgtagcataaaggggattaaaaacaggatgccatgaaactagagaayaaagactaattctgaatgtgaaaataagcttcttgaaggttggcatttgaataatcttaaaaggataagaagagatgtgggattgcactgtaactacagtggagagctctgaaattacactccttgaggtcaaatcttttttttttttttttttttttttgagacagagtctcactctgtcgcccaggctggagtgcaatggtgccatcttggttcactgcaagctctgcttctcaggttcaagcgattcttctgcctcagtctcctgaatagctgggattacaggcacgcaccactaggcctagttaatttttgtatttttagtagasacagggtttcaccatgttggccaggctkgtctcgaactcctgaccttaagtaatctgcccacctcagcctcccaaagtgctgggactataggcgtgagtcaccatgctcggcctccttgagatcgaatcttgacttccaacttgcgtgaatttgtgtaggtcactgaaacttcatgcgttcatattacaaatattgctacatatatgacagtatatgaaacagacaaaaatatgtgccttcatggagctcatattctagtgggagaaatagacaataaacaataaagatataagtaaaaggactgccccttaagttagcaggtgataaggaaaggaaacaaggtcaggtaagggagataagcagtaccagtgtggtgttaggggtcctaggaggtgggtaggcttcactgaaataatggcattggagcagagacttgaagcacatgagggaggtagcctgtgttatctgtgggaagagtgtgcccagtggcaagaacagctggtgtaaaggccctggggtaggagcacgactgggatgttcaaagtgtagcagaggggccgttgtgactaaagcggaggaagacaagagtagaaggagatgtcaagttatgcagggcttcgtatgcctttggaaggactttggcttttactcagtaaaatgagcaggcattgcaggctctggagcagaagattaacagcatctgacttagatttaacactttcattttgacttttatgtagaaaacaggctgtattgaggcaaggacagagacaggcatatcaactgtggtagccaggaatccaggcaagagatgctaatagttcagtccagagcagcaacactgaaggcagagagaagccatcagattctggacatattttgaaaataggagcaacaggatttgctaataagttgatatggaatggaaatgaaaaaaggagttgaggctatamtcccagcactttgggaggctgagccaggtggatcacctgaagtcgggagttcgagaccagcctgacaaacatgaagaaaccctgtctctactgaaaatacaaaattagctgggcgtggtggcacatgcctgtaatcccagctactcaggaggctgagacaggaggcagaggttgcgrtgagccgagattgcgccattgcactccagcctgggcaacaagagtgaaactccatctcaaaaaacaaataaacaaaaaaagagagttgaggctaactcctgggtttttggcccaagcacttgaaaggatggagctgccatcaactgagagaggattccaggtcagagttgggggaacatcaagacttcagttttggaaattgtattagtcagagttctctagagggtcaaaactaatagtacatagtagtatatatatatcctattagatattatatatagatatagtgtgtgtgtgtatatatatatatatctcctattatatattatacatagatayaggtatatgggagtttattaagtattaacttccacgatcacaaggccccacagtaggctgtctgcaagcttgaggagaaaggagagccagtctgaatctcaaaactgaagaacttggagtccaatgttgaagggcaggaagcgtccagcacaggagaaagatgtaggctgggaggcgaggccagtctctccttttcacatttttctgcctgctttatattcactggcagctggttagattgtgcccacccaattaagggtgggtctgcctttcccagcccactgactcawatgttaatctcctttggcaacaccttcacagacacacccaggatcaatactttgtgtccttcaatccaatcaagttgaccctcagtattaaccatcacagaaatgttaagtttgagataacttgcaagtgcaggtgcagagtagccacctggacataaaagtctaatgtttgaaagagaatttttggttgaagatataaatttgagagttgttggttctgcacagtggctcatgcttgtaatcccggcactttgggaggcaggcagctcacttgaggtcaggagtttgagaccagcctggccaacatggtgaaaccccgtctctactaaaaatacaaaaaattagccaggcgtggtggcgggtgcctgtaatcccagctactcaggagactgaggcagaagaatcgcttggacttggggggcggaggttgcagtgagctgagatcgtgccactgcactccagcctgggcgacgactgagtgaaactccgtctcaggaaaaaaaaaattgagagttgttaacatataaattgcgttagagctttagactggatgaaattcagggagtaaatgtaaaagaaggccctgcattaatcactggaacaatcaatattaaggttttcagggagaaaagaagataacagtaagcgactgacaaagaggcagccagtgaagtataaggacaactaagggagtgtggtggcctggaagctaggggaacaatgtgtatgcagaagagatgataattgcccctatattagtggatacttaggagcattaacgcagtaataacatagcgtaatactcaactcataggaagtgtgcagtaaatgttagctcataatagtaatggtggaggaggtggtaatagatgtaatgcaagtagtggtatttctgagcattttttgtggtacataccaaagatatttaggagaggtggttctgattctttcagctagttattaaagcatagattctcatcatttttcatgctatgatcctttttggcagtctggtgaactcttctaagaataatgcttccattttctgtgcctaaaataaaatacataggattatacaactatattgaaatatgataatcataatatttaaaaagcaaatgtgttgtacactttttaattagtatattcaatgtcaatatgtaatagtctaacaatttcatcatggtgatgcatatgaccaatatttcaagatatctgcagcaagtctattattaaaaaatatgtaatctctattgttagcaaatcatccatgtggatattctgatggtttggtacctactttaatgatagaaaggactgctaagtttagtcacaggttgtgaaaataaatatgtacccttttcccacatatgttcatagagtcctaaattctatctttggaactccagattaaaacccttgagttacaggtaaaataaatcccatatataggaaattgacataggaaaattcattaatgatgtgtaaattataatacactatgatattatattagtgtatttttcaaaagaagaaaattgttcttggaacaccttaataagaacaggtagataattcaagtaattagcacattgtgccagtaatgttaaaatctctgcttcagttctgagtattaaatccattaattccgtataaagaaaaaatgagatacatgagccccaatgagctgttattcatgcatgaaattagccaaaagatagagaaggcatgagaatatgtttactttttctctacttctggaaaaaaaaaaaaaacttcaacagtgtttttactagcagattaataggccacattccggacagtaggcacaccagaagcttgcctatttcaatacattccactcttttattctaatctccagtgatgaataatacgggcatcacaatataagagaaagattttggaggaagtaaacaatccacttgatccactatcattgtagggaggaaatcaaaatgccataaacaaaaccctacaaagaatttttgctaaagatggaaaatgctcagttcatctaggagagtttctatgttactattaaaggctttgtaaaaaaataaataaatattataccccaaatarttcaaatatttcttttagaatcatgaatgccctttggaaaggattgtgaagtgaattcttttggcctcaaataatttgatttgcaaacttgcaaaagattatttcttttcgttttagctttctgttttgcattgtatgccaaaagggaacatatggaacttctattagcttcttttattttgttttttttttttttctttttctttttgagacagagtcttgctctgtcacccaggctggagtgcggtggcgcgatctctgctcaccacaacctctgtctcccaggttcaagcaattatcttgcctcagcctcccgagtagctgggattacaggcaagtgccaccacgcctagctaatttttgtagttttagtagagacagggtttcgccatgttggcgaaactcctgacctcaggtgatccgcccacctcggcctcccaaagtactgggattacaggcgtgagccaccgcacctggcctagcttgttcttttttttaatttaatgctgtgatgataagctggtaaagactctctttacttttaggtcaacgtaagaatgctttgtcaagcagtaaccttgattttgtggttcctttaaaacagggagtgtggagctggtacatttgtcaattttgcatccttagagagggatggaaagcttccatacaactggtgagtattgttttggaacaagcttctacatagtttaactatgctgtgtgtgctccaaagtcgattttactatcctttggggatagttttgtctgattatccttttgtaatttcggtgatggtagactttcaatggctagatcttcacagaatataatggtttatataagctcagtgcagttctgaagtagggaaagcatcatggtctgctctgtatttacaatactaaacaagggactgaaacagtggtgcacacgcaggagcccatacctgtgctgaaaaagggcttaaatgcaggagcgccgctgaacaagtggtggctaaaggcacgagaagagattccaatgaagcagcttgcgacagatcggcttctccattttattttatattttattttattttattttttattgttttgtattttttgaggagacagaatctccctctttcgtcacccgggctggagtgcaggatgatctcaactcactgcaatctctgcctcctgggctcaagtaatctttccacctcagcctcccgagtagctgggactacaggmgcgcaccaccaaatctggctaatttttagatatttgtagagatgaggtctcactatattgcccaggctggtctcgaactcctgggctgaagtgatcctcccacctcggcctcccaaagtgctgggattacaggcctgagcccccatgccaacccagcatctccattttaaactcacatttcagtgcctgaggcaataagagccaccacttctgttaaaaagttgtacagcccagtattcagttctcatgcttacagataaataaatatcaaagccagtgaagtttcataagaaaacatggcttcatttttctttatgcttgagtattaaggacccggaaggaggaagtgttcgaattttaaagagcattgtcaagagattaaattggttgacattatacctgacaatgatagatgaagattaacaatcctatccagttcaatcaatgcccaacaaaagtactaattaagtaaacatttaacatgaagctaacatgtactacttacatggtctagtttgtttcttttgcaagaaactatgcaaagtatatgtaaatgaatatatgtcatattaatcattgttcagttatttctttctgtttactaactccctaaaatggttaatcttaaagaaatacacatgggagactggaaattttacagaatcaatgagggagggagaactttatttaggatataaattttacttccctcagtgtagctgatactcactctagttgaaaatctagttgaaaccagatttcttttaataaggcaatatgttgtgccatttaaaaattttaacatgagtagaattttgctattaaaaaacaacccaactgtgaagaaaaagaaatccatcaacccttgatggtgaaaagttaggaaacgttactaggtttgttcaaatatattagcactctttccaaaattaagaggttgactcactgatacttgtttcatgcctggttcacccttgggaggcccaatgggagatcagtgatgagtggcccatctaggaaccaatccaattatatgtatttaatacttgtgactcatgagagatagatattaactaacttcacagccagtcacaattcatggaatttatgggagaccagtcatgggagagctgaagcaaaaaagaattcacttcaggatctttctataaaatcaagcacattttgcagctcttcacaaagacagttttgccgactctagcattttctagctgactgagaatagatatctcagtgaagatttgtaataactgaagtgacaaggtgacagtatttttccccctaattctcagaataactatagatgcagtcacaggatattttaaaatctatattaatgggtgttctatttgacaagtggtttgaatatctgaaaccaggcatttaaatcaacagtctgaattagaattgaagtgaagctaaactattttgctcctacttagctgaatatcagtgaggtcacagactaagtagttgatgagctacttatcttgaatgaatgatatccttgtatcatccatacctctgttttaagggttatatttataaattttatagtaatttaaaaacaatacagaaagtcacacctagtagtgcagytttattaagaatgtctcttaaaagcttagtcttcaccggaatcagtatatgtaaactgaccatttttattttctcacacaagctgctgtttagctgtcaaatgatgttacagaggtttcttaaaataggcttaagcataggaagaataatatccaagaataagcttcaagataactaatgaggcatataagtgcttcatttaactgaatgcaaaatgtaatcacctggtagcagactaattaacacaaagtaagttgaaagaaatatatctgattacaataaggtcatgtgtgaataaaaactgattttgtcaatattgtagcatttaagcccgcacatttatatttcacagaatggattaatatttaattgtaattaaggtgcttgtcatattaattaatcccaataggtaatttactgatatctrttcacagtttatattactaactcttgcaactttttcatctttccatctgttgtctattaatgcacacaggcgtaggagtatatttgctttcttaaccctgctaccctcatgtctttggactgattatcttttggcattttatattaatccttggtaagtgatttttttttactgtttaacacaaactctttaaaagttagctttcaagaagtaaacaaaaaggaaagtttctttttaactattttgtatgttcagtaacatctaaagttattaatcatgtattgaagtgaattaaagcagttaccggtacaaagatattaactataaggttttccgttaaatttttttccgtgatgttgttggcaagcgttttttcccatttagtactagttatttgtttcttcattgagtcaatccattggcctctcatctttgcaaataatgctttccattttccattatcatcttcatccattagagagctccaaatttccaagaaggtagaaatgcattaagatggagaaatcagagtctatacaatcctctgtatctgaggcctccttgtttttataataatgctaactcagtgactattaaacagctgactatacgcaagcctctttgtatgattatctgatttaattttcccccrcaatcctgcagagagtattactagtcccattttagaaatgtggaaataggggcttacggrgatttactgtcttagtagcacattccactatgtacagaatccaggttccaaactcaggtctctctgaaatctattctttcctctgtaaagagcagactcctttaatttcttattttcttaacttctrgatcattttaataatcaaatcttgaagtgttccttttgactttttaatatgtaatrataacagtaaccttgaattctgagactaaagaattaagaactctttcttttcctgtgctataagataaaaggtagcagtttccargggaactgacaagaaaatcattgtccttaaatattaatacctagtgtttaggtactaaattatgtacagacagatccataaatgtggacaacttgaaaaggtctcagaagaaaacaataaaaatatctcatagactggaaaaaaaatagcttatggggtggtggtgcgggtatgaaaagcaatctggagcatttatttattcaaaaagacaattgaccaaatgttctccagctcctccaaggacagaataaatacagctggcagaatttaggatttcaagttgcactggaaggaacataaaaaaggatttcctcaaaatagagattgttaattccagaattcatatcttcttttaaaaaaagagactagaggaaagcttttgaaacaaagtagacatgatgtgtaggtaataaagtcagaggaatgtgctagatgctgaggacccattcactgttattctaagttcattgttacagtttttagtatagggcttcagcacagtcaactccgtattttcagtatttgacatcaaatagttttcaggtatgaatagcacacataaattccatttcaaccttcaaaatatacatttacttttaactgaacatctactaatcatcctcaaatagtgtgcctaccattaaaatactaacagcaaatacccataaagtatcccagattgcaaataaaatgaaagaaagatgcatatatcatttccttgcttaattctctgagactttctcattttccacagtgcgtttttaagcttctgtaaggtaggcctgtgcaagtaagcatgtattccttaataggcctcattgatgaacatatgctcaaatttcagcaaccctcacaaggtctgctatttctaataccaatcaaatagcacgaggcccaacttatggggagaaaatacccttcagtaatttttagaagaatcaccttgaaactgtaaatggttgtctccagttgagaagagaaggtaaaacatagagctgcatgctttctgtaacttcagtaaatttcacacrtatcaactagtaaaaacatactggatataaactatgttctcagcccttttgtacaatgccagatacaaaagaagtgaaattcatgctccccgctcgtggaaatacagcttctactcacacaaccactccaattccctgtttgcttcatctaataacttgtggttattttcccctgctttcattggctaaagagtcatttttaatcctcctaatgatgtgtttgtcttcatatttcacctaccctgtgaacaacagctgcaaataacaagagccatctccccagacgcacactgcctaacacactgtccaacttcctttctaaactgtcggtttcttggaaatatatgttcctgttgattttctaaaacccatctgatgccactagtggtttgtgtggaaatcaaaaaactctttctctctctcatagtgttgctcgaatctcttcctggggtggtagcagaatcagtgtggagcaccagtacccagttaggttggtctcaggattgtgttctgcaaggatttctgactttcagaacttaagagtatgtttcctattgaaagaaatcatctaagttgaactagctatatctagattcagtgttaaatctttttttttttttttactgccataatgaccctcatgctgtactcaggtatttatctgcttgttctcaatcctaggcagttggcattttaagcaagaagtggcatttagttgaaaatgctcagctttactcctgatgattgcacattctatttgaagaatgatataatatactaaagtcctttttaaggtttggggatggtttctgcttagctcatcaaagagtaagcagcacttacaaaattggagacttttagagttttgttytgtcttgttttaactattataaatctcatgtccttgctattgctttttcggaatgaattgcagtatggatggctttccaagwctgtcataaccatggctaatttatgcagaatgtatcttaactttttgaagtcattaggattttgaaccttacctaatataagtgaaagagaaaaaactaaaagtgcacaatcctctatgcatatatgctgtaggtatgtctgatgggggttatttattgatttggaaaatcttttgcaatgaaaaggcgaaccctacatgtcacacaaaatcgtcactgtaacatgtgcacatacatattggctctttccagaatgtgcttaagttaaaattgctagcaaagccttaatttgcgtgaattttcccctggttttagtctcggaattagcacagcaattgaaaatgtaggaacattttatcagtgttgctgtggagtttcataattcaatcctgtcatgttccacagccttaggatacagaaactccttggaatcagcaagatctaaatagaacaatgaaaattgtatacaaatcatgattacttatgccaataagtatatgataatatgtcatacaaaacatgtagtggaattatacgttatattgaaagttcattcaataatgaatgagattgaaagaaaaaaaatgtgtctctcctccatgaatcaagtttctacgcagctgccgagtagtagcagcttaatatttcagcactgaatttattcagtgttaccctcttacatacatttgttacttcctagtttcttttaaagcctgtttggataggaaagtatttttttgttcactcctgatcacaaaatgtgttggcagcctcctgactttaccagagctgttagtcatctccgctgacattctgctttccgaaagcactgaagtaattggctcttactacaggaagtaaatgtggaactcctaaaactaactaaattaccatcacggggctgaataaaaaacatgatcaataaatattcctttaggttcccaaatgcctataagatacagctatgtccaacatgatagtgttttttgaggggatcagggagaggcaaagtaaaaactggactgatttttccctctaaatctcaagtgtggaagacaaagaggatgagggagaaaaaatagaacaagaaccattgaatggattgttttcacttagaagtgggaagaaattaaaactacctgaaaaccacaaacaccacttgccttcgtggacgtgttcctacatttcttgacctgcattattttctcttcatccacaagtcccatcttttcaatcagaacatcacaagcccaagtctagtattcaattgttaaaggaatcattaggtgaaattcagagggtaacatggcagagattattttgtttcagttcaactgaataagcatttattgaccacccactaggtgtttcattaactatgctcagccctggggggaagctatagtgagtgtagcaaggtgtgtacctgcaactaacaatcacacaatgtgagaaactctccgtttgcaaagtgctgtgaaagcacaaagtactgcttcgtcctgctaaaagctttcaggaagtggagatatccaaacattcataattttaaatataaataaatatttggacacattaaagtactaagattacaactggttatttactatagactgtttattttctgaaaagttgggtgcttctatcaaaattatgtaaagacctctgaaaattacttgcaaaaaagtttgctgtaacatcacttgtacagtcaatcatgtttctgtatttactatttatagacaacaataagaatacaatcacaaagtgcttcaatagatactgttagccttagctaacttaggtaagttatcttacttggttgggtgaaaatcattaccttaattatctcctaaacaaatgtaactaactaaagcatgcattagcatttcctgtgtttgagcttatagactagtaatgatgaagagcaagcaggtaataggtccagttcttcagatagcttaaaaattagttcaagatggaataaaaacaacgccatagtagaattatacaaggtacatgtccacactgacagcacacattcacatccccagagaaaaatgtcagaaaatgttattttagtctttaattaagaaaacaacattccaccgtctctttattagttctccatttattcccccattcttccttcctgcctgtagaaattggagtgttcaggtggtagatagatacttctatatatttacaaactgctttagcaacttaatcaacagcagttagaaatttcatttctagaactcagtttttggcaaatgggaagtataaagtgcagatatgttcatgcaatctagtagagttttaaaaaatgaatctgaaattattattatcttctcatgtaaggaaaagtaaacaaacctgatatgtgtttaatgaaaattaaataaaactgaggtaccwgatgtaattatttaaagctgttcaagtttaattattatgttaatcaattcttctgcccagataaatttgtcttttcttttttaattatcaggagtaaaaatggtttaaagaagaggaaactgacaaagtaagtttttcttactatgtcatttaaaaggatgtttgttataataatcttaacgttccaattaaagattgcttgtcttcaaagagaagggacgcttaagaaagaggcaaatgcatattacaatagctaagcacaataatgtactggttgtttatgcctgagtggcagtggccactagaaaagtgtatcacagaaatcacatcagaaataaggacaatgtttatcatatcaaatctgagagagtggatcgttagcaatttttaaagtcttggaggaggaagtatggtattctaaatacagtatatgaaaatctaatatttaactacatcaaagggtttcaaaaatccttttagtattttgaaattctgtgtttattgcaggaaaaggcttttactctatttgatgttataatagatactttgataatgctttctcaagaaacctgtataataaatagaaaagataattaatctagcctgtggttttccttatctattaaaccattaaatgagaagaattactattgtggtaagtgaaaattaacccccagttgatttcaaaagcctattagattatcacctccatgccttttcttagttataattctacatatgaaaagtggaactttcctttatatagagtttgttcttgatacctgcctggatagaacattggtgaattagtacaagaaggaaattagggggtccagccaggtctgtggcatctatgcttatggaaagaaatcatgagtaatccatgacataatccaaaagaaaagttgatgtaaaaatgtttctagttagtcttgagtggcatataattttatggcatatatgaaaacagaataattttttctaagtcaatttcattttttatttttattttttaatttattttattttattttttggagatgaagtctcgctctgtcacccaggctggagtgcagtggcacaatcttggctcactgcaacctctgtctcccaggttcaagtgattctcctgcctcagcctccccagtagctaatactacaggcacacgccaccatgcctggctgatttttgtatttttagtagagacgaaatttcactatattggtcagactggtctcgaactcctgacctcatgtgatccaccctcctcagcctcccaaagtgctgggattacaggcatgaggcaccgtgtccagcctctaagtcaatttcaaaccagcatacattccactggcttataccaactgatgtaggagagataagaccagactgaatagaggagagggtaccatcacctgggagggatgatttcacagaaacagaaagactttgttaccaaaaactgttggttgggttggcaggtgagctaaagaggcagagactagagcatttagaagatagcgtccttggacgaaaaggagagactgtcaaggcttgctcctcccatgactcaggcaaagaaaagaaggagaagcaagacccagacaaaagatagggtagagattaggagtggtagaacatacccacaagcaaaaaaaaactcacatcaattcggcttccaccttcccccctctcattttcctttgactcctctctccttctctagaagacatttcttgaaaggctttcctctcacctttttatttgccttctctaccatttctctttccctccaaatgccccaccactaccrtatccccctggttcccattttctatctccacttgtcttcattccatccttcctttccatcacctcctctttttctttttcctctgtagatatttgtccttttggtctctactcccttccagctttctttttcttctccttgtcattctccttctcccttatgtccattcttctgtttgctattccttcctctctctctcttttccctctgcttcttgcttttacttcttttaacccattaatactttgtctggtttgccttctgtatacatgtgcccattttcctagtaacaagatgaaagctagagttgttaaatccaactttaaggtcgatayactgcccaaagacaccagccagagagtgcagttctaagggggttcattccaggagaggagtcccaactttagcccattcttttggaaggataacaagtttgaagtgggaaaagctttgaaccaggacttactctccctggattccagtgagaattctactgcttagtagacatgtgatgttgggctactcacttaactctcttagccgtggctctctcagctggagcatggagctaatgttgtctattcctacctcagggatcaattaagcaagataatgcatgtgactatttatgaagtgtagcgtgttttataaatgagttattgttattaagtaaaaacatttcagtttaaaggtattctctggaagatataacgccctctaaaatttactaaaatgttaacataaatgaattaatcagattagctaatcaacaactttaaatgagcattattaaatactatgtattttctaattggacataagaccacagttaggccaggtgcagtggctcacacctgtaatcccagcactttgggaggctgaggcaggtggatcacttgaggtcaggatttcaagaccaccttggacaacatggtgaaaccaaatctctactaaaaatacaaaaattagccaggtgtggtggcacctgcctgtagtcccagctacttgggaggctgaggcaggagaatcgcttgaacctaggaggcagaagttgcagtgagccgaaatagtgccactacactccagtctgggtgacagagtgagactctgtctcaaaacaaaacaaaacaaaacaaaacaaaacaaaaaagaccacagttagatgatataagctgagtaacacaccacaagaccaagggaagggtcaactataaagaccctgccaaagtggaaaggcttgagttagatgacagaatgtggaattctgcagaagcagagagctactttagagagcaaattggtttaggtaggctctagaggagataagcagctacagaaaactacaggagataaaacttgattcttattctcaaaaaaaagtgagaacttctgctgcggatgcagaaacatagctcagatgtgttacttgattgaacctctgagccatttccatacttttatagatatgcaagcctctaaagataactcactccagtgagaccctgggagctttctggacaaaagtttcatcccactgatcctgcctctgctttggggagactgtagctagcagcacaattccttatacttgtaaagctgttgaaacttacaaagttctttatgtactgtatgtcaaccctgtagctgtaactactgtattttatggatgagaacattgactctgaagagttaggcgattctctaggataacacagtcaataaagcaaaaccataactcaaacaggtctttggaatccattcctttgttattttccatatgccagagttttttagaagcaacacagatgggggtgtgtgtatacgagtaygcatatatatactactgtactgctacagtaagagccaagtggaaatctagagatttctcctatcaaggaagctggatatatatgcccttcttttcaattgcaatatattaaggattggtaacttgaaccaaaaaaaaaaggtgagtgctaaccttagagaagtaaaayttctattttctccaagaagattaagaagtatgatattaaacaatatataatacctatcaacaagaattttaaaatgtatgtatatttctttgtgtttggcaaagcccggttcaactggatgactttgatgcctatattaaggatatggccaaagactctgactataaattttctcttcagtttgaggtgagttggttaaggcattttctaccttctgtaatggaaagggcctgggaattggggggtttgtgttgcggtcatgtccctgctcactggcagtgcgtaacaaaaagggtattggcctggggrttgctgatctgctggtttagagcaagggttgtcaatccttgcttagtaggcaaggcctcaggtggcacaaatgagatgaggggaagaagagaataggtgcaggtactgaggtgagcaaacatgggtatagtagaagccatcattgaaaaccagggaaatcgagagtacaagaagaaaaatgcaagctgaggcatgaagcctgagacagaatttccctttcaggggatttgtagtgtttctcatgcttcttaggccacagtagtggcggatagtggataaaactgaccccctttgtgtcctgggcacataacatcctggagtagggcttttcaagctataggactcctggcattctacttaataacttttgtgcagttttattttctttccttggacaaattggggagataaagttacacatgatttgtgttaagaaaaaaattgacaacatctctttttttccgaaggacacatatttctttggatctaaaaccatatgtcagaagagatggaagtgagtgagtctaatatctcagcagtgtgggggaagataattagttctcactttttctttctacatattttatagctcataacacagtctaaatggccccccatccttcaggtttctatagcatggcttgagtggtcagtgattcagggaaaaggggaagataaagtgatttttctaaattctgtagttttttttttttataaagccttttaagtgctcttttctattaaggtagctgctttttcttcagtttttaaaatcatttctcctttccacttctcagccaaggacagctttagtctgcaaaaagcatcagtggtcctggtgtggagacactaatggggaatttgaggatgagaagaatcttatacattaccaaatacaaagaccgctaactaccacctgtgtcctgaaaaattccacacagagcctgctcacttatccattgtatccaggtgcataggatattatagatgctacaccaaatgctatactcaaagaaattcaatttgaattggaaatgaatgaggaggatggcatttcagaaagtatatcaaggaaaggaggactttttttctaagcaaacatgaggcaaaactctgaaaaaataaatagctagatgattctaacgatgatagaaattatggtatagctacacttttaccttattaaagcmacattttcttaattccttcaagatggcatgcccttggtggcacagctggatcataacctctgctggcaactcacagtttatgtcttgaaacccaagcataactattactgtttctgaattgcatgaaaaaaaattcaacaagtcattttccagtaaacatattcttttagttgtgagtgacaaaaacatagctcaaacttgtttaaactaaaggaaagggggtttattcaaaggatactaaggtatctcatacaatcaaagaaaaggttgagtagctagactacgtgcagggaagcagcacagtttcagggatgactggagccaggggcccctctatttctcatttctgcttctctctctgttttggtttcactttgtttcactgaacaaagagaaacaaagagaaacgcagccagagagggcagatgtttgtgttcagtgaaacaacaaacaacctctttttctgtcacttttgttttgttttgttttgttttttgagacagtctcactctgttgcccaggctagagagcagtggcgcgatcttggctcactgcaacctccgcctcccaggttcaagtgattctcctgcctcagcctcctgagtagctgggactacagttgcccaccaccatgcccggctaacttttgtatttttagtagagacagggtttcaccatattgactagtctggtctcgaactccttaccttgtgatctagctgcctcagcctcccaaagtgctgggattacagccgtgagccacgatgcccagcccaacctctttttcatagtgaaaagcagccaacaacaacccttgagcaccacagccttttgtttccatggtttccaaagggaattactgtctgtctttcttgtttgtagtttgaaaattaacaggggaggattttgatggacgagcctgtgtcatggtgcccattcaaaccaatcacagccagagagggcagatgcacagaatctctaaatggaaccatgtgggctcaagtagcaaaacctaagaagggcattatctcccaataaagagagggtattgggagaaccaaaccataagcgattagcatgctatctttagatatcacaaaaatatgaaaagcagaattataaattttatgtgctaaatgttcaatttataatatgctgagggcttttattcattcaatggataaatgaatacatttagcctgacttcataggatttataagaaatgtgctaaactaggaatctaaaatcctgaatcctcactacagtgttgctactaattaacattctaaaaaatatgtttttttcttaaccaattgatatataatgagtttggggtgggcttgggggcggatgatgtattagctacagattttttatgtagtgaacatgctcatgtataagtttcaatttatccaactactttgttggaataattcttatggattgaaactgcccaggcaaagtatatacaaaatctgcattttgagtaaatttcccataagtggagtaagttttcccagtgttcctaaaactatacaaacagtatagtatagtatatacttcctaaaactatacaaagagtagatatcaacatttgtaatcattgataatgtaatattacaaagaaattgctttctcatctgttaacgttaagctacatcatcttcatatagcactattagtcatttgtgttatttcattttcctctgtttcttttattttcatgtaccttataatcttcatcattttgttactgatttctaacagctgatttatgattaaagaggttaacattttgtgaagggctgaaaatgaaataccatttttttctcattttttttacattggggttttatttggagtttgtacagaagttgtgtatttaaaaaataatcatgttctgcttttttttaagtacattttctcatcaccttagtatgagtaggtgagttgaactagatcaatggttctcaactggacaagtaccagtcagcccccagatgaaatttgaaaatgtgtgggagtgtttttggttgttataatagcttaggaggaggatgctaacagtattttatggaagagggacgaggcgttaaatgctcttcaatgagtgggacattcccgcacaatagagaattgtcctaggccgaaagtgtttgattgagaaatatgggttaaatatgggatgaggctacaatcaagctttataacccatgtgtattagtcatgggttctccagagaaaccaatgggatgtttatatagaacaaatatgatgtatatatagagagatctattttaaggtattggcttttgaggttatggaggctgacaagtctgaaacctgaagggcaggctggcaggctggagatccaaggaaaagttgagtttgcagttttgagtttgaaggcaatggggaggcagaattcctccctccttgtaggacctgtctcttctcatcaggccttcaaactgactggatgaggcccagccacattacgtagcataatcagccttcctcaaactctacttacgtaaatgttaatcacatatgagaaaaacaccttcacagcagcagactggtgtttggccaagcaactggacactatagcctagtcaagttgacgtctaaaattaaccattacaccacgattttaaagtctttaatattgttatttattmtgatgctytcttcatacatttctattcttagaacattattggtcatatatgtaattaattgggtggtaagtcctgacattatttacatattctggtaggaaaatacaacttactctctagggctctgttttaagtcacaggcttagactgtatgttttggactaacatttgctcaagcagtggcccrctggtccaatttacttccttcttcatttgacagacttcagatattaccagtcctcagtcccattctgccccctacatcctcagggtcagcgtcagggtttcctcatcaattttcatagaagtagtgtgctcccatgcctgatttcaggatgtatgctggacctttcacatggcagccctcacatttttttgaaatacattgatagttaattgagacttaaggaaaaaaatgttcctaactctaatgagaattcaagagggtatgagatggccraatcaccttggtctagataattccagyagctgaacttgtacttgttctgtttatattaatgcctagtatttgtattcattttgatrctgacattgaaatatcacattcacattgagaaatcacatcatttataagcattttgcaaattgaaactaatgtctggatttatagatactaccaatacagccataagtcatacatgaagctatatgagttactaatttgtgtttactgaataaatttcttttttactctgaatctgattttaaatctgctagaaagattgattatccttctgataaaaatatacaccgttcctttaaaagtcttgggacccagggattaaaataggttcctcattttttacatttcacatgggaaagattttgaagaaccagactttatagctgaaatgtgagagcccagaagacatatcacatattgctcattctgctattaatgtctgtgcttagtgtttgatcaggatactagtaaaggccctcaccatctctgttcagacatgtggctgcaaagatcaaaacaaaactacagaactggccatgcagttcacaagaggtgacctttgatttctggtagtagcttttacttgctatagatggaacctcttctgtcaacaccactggcactttctttctcctcactttttccaccccttatggacacgtaatctagtaatcttagtattgtttgaataaaccccctttcctttagtctaaactagtttgagctatgtttttgtcactcacaactaaaataatgtgtttactggaaaatgacttgttggattttttgtaatcatgcgattcagaaacagtaatagttatgcttgggtttcaagacataatgtccaccctatcccaaagcaaacacygaaagcaaactctcacctgctgacattgttacaaaccctaagaccagaatgcagattgtgctctcctcagaagatgatattgcaggttatgggctgaatatctgtggccccccaaaattcctatgtttaatccctaacccccaatgcaatggtatttggagatggagcccttgctaagtaattaggattagataagctcatgagggtgaggacttcrtggtaggattgttgcaggacttttccttagttcagctaaagatgaggtccttgtccatcccacagccatgaaaatttaggttcacaggcaatttggagggtgagtaaaacagggttttattmggtgaaaaggaagaaaagggagaaacagggactctcactaggctggagtccctgctagagcacttcccactggcagcttgaatctcaggttccacacaggaagaggaaaggccaggttccttccccactgcaaacatggtgaacttcccgaggctccacctctgtgagcaggctagttggaatttctccaaggaccccctcccacctgactgtctcaggatcagccaagataagatgcctaagaatgaaatctaccttgttgccatcttgatcttggacttcccagcctccagaactgtgagacataaatctctactgtttaaactatcactctatggtgttttgttatggcagcccaagccaactaatgtaatgtatatgcttgtgctttgctttccaagacctgtatgcttcaaacacagccaacaaaacgtagcctgctactgggtttgggtgaccgtattagttcctatggctgccataacaaattaccacaattgtcgtggtttaaaacaacagaaacttattctcacaattgcagagccagaattccaaaatcaaggtgtcagcagggccacactccccctgaagactctagggaagaatttttctttgcctctttcagcttctgttggccacagcaattccttggcttgcagctgcataactctgatctgtctccatctttacatgccttttcctcttctccaggatgatctcatctcatgttctctaacttaattacaactgcaaagacactttctccaaattagatcacactcacaggttctgggggttaggaggtagacgtatctttttggggatcaccattcaacccactacagatgactgtatagcctagaagaaaagggtgataaattatatttagaaacaaaactgacaaaagaaaattcagaaatgatttatgtgggtttcaggtccatcactccatagtttgtcttcataaagatttaagccagtggaatttccatatggttggaaagaaaataacttcaaagctgctgaactggaaacttaatattttattttccacttagtgacaggctaaattacaaaggcttcaaagcatactgtgtttacatgcagttcccactttgctgcaattcaactttggcaacttccacttacagtgttcagccaattaaacctctcttatcaacttagagtatttacagcaggaaggcaacacacaattaaagttctgtcagttmgtcagcttccacaattaaagttctgtcagttagtcagcttccacatgtgctcaaacgctcagcctcaatctgtttccaccattccttttgtatctgaggccttttcccatggcttatcagtctgtccccaaagcaagagaattgggggaagagttgttggtctgctggcataaatggcagaggaggaagaaattatggagccaggcaaagcaaaacaaagaatcatcacaaaagtattttacaatgatcatcaatagtgctgtattagtatttgttgagttaaattattccatttgataatcactataaaaaaggaaggtgtggagaaattactagccttatcttacaggtaattaaagcaaagtttaaaagagtttaactacccttccaagaacatacagtttataagtggcatgtcagaatatgtgagatattttgaaaaaatatctatgcaggcattttctaaaggaggtagatttctgaaataatttaagcaatggaagcatcatttaaataaacttataactaccaaaaggaactaacctaaacatcacactgatttagttgaaatttactaaaaataagttgcttcttacaagaaaaatagagtcaacctttgaataccctttaaaatggaacactcagttataaaataacaatgggaagcatctgcctaaatatatttggcaagtaagtgcctgagatggaaaaaaccaattttgtgagttgaaaatcaaatgtaacatagtttgtatataaaactgacatcaacttagtccaaagaacttcagatattgtcatcttgaaaagccaaaagagatgaggaatcaaaggaagagagaaatctgggcaatttttgttggttcatccatgttggctacagtcaggcaacccaatgccattaagcgcaaggtaatttgccaccaaggatcttctagttaaaagcatcagaagacccaataacttgattaataaagcatgtgctttgcaaagagcacttgaataaagacacaaagggcatgaaacagatatccctattcaatcctagaacgtggtcaagtggctccaattctcttcaacagtgttaaaagaccctccgaaattcttctcctagggaagtattcctccagctttgattccttgaagtaataattgggaggaattatgaagagtaaaacttgtgctcaatattaacattctataaatgtaaataaaatttataacaagtgatttttgcctcgcttagtagtcttatagaaagatgcacactatgtgggtaatcccacttatacacagttatgtacactgtttactaacattyctctaacatttgtataggaatataactagatccactgcattggttgcacattgtacaactccagtgaacaccgttcatatagaccacaatgtgaatgatgcctccaagaaatacaggtggcctgaccgtaatccccgtttcctgtaagacacatggcatagcaacttagaaatccccctttccccataacataccmtttttgaagtgtgacagttatttatataaaaatttcccatcagttcaccttctgaaatgaggtttataagagtaccaatatacgcaggcagacatttggatgttcttattctcactgaaggattttccccaacaactacagatccatctttatgtttgaggtttcattaccagatatttagtgactgttaatcccatactttgtaacatggagattgttccctactcattcctcactattttttactactttctctaaggctcattgcctacaagaaaaaaaaagcctagatttcttcagagaataggaaatatttatacaaattgcataaacttaagttactctattcctccaaaaatctgaaatgcatttttattttcaaatatttcataccctgagtgttatacatatagttcttacttctccaaatgaccactaagttatccaaggtatttatgtgttgtattagatagctattaccacaataatgctgtataagaaacaacctcaaaatctctacaataacatttacttttctcactcatgggtctgtggaacagctggggcagttctgcttcaggctgtgggtcagagtcaggtctgccctatgtgcctcctcattctcggactagcagcttccctgggcatgtcttttycagggyagatggcaggcacacaagagggcaaaccaaacaagcaagtgcaytgaaagcttctgagtggacttgatttctatctaagatcattggccaaagcaagttgatgatagtggggtggagtaccttccacctctaaagggagctactgcaatgtcatatagcaaagggcttgtgagcaataaaccagtgtgaacaataatccaattcayaccacgtatggaactctcaaatccattctctgtcctttacaggagttgaaattgattggactggatatcccacactttgctgcagatcttccactgaatcgatgtaaaaaccgttacacaaacatcctaccatgtaagatcgtcaattgtgccaataacactcatgtcttaagggttgaaggactgtcattgcagattaatcaatttcaccaatctctggccatacccacttgtggtccggatctcaaggccacgtctgagattgcattgatctcactctcctttgatgtctttagatcttagcatatggaggaagatttaattattgtgcttttaaatgaattgcatctgaacaaaaagactgatcatttggccctttagagattaaagagccacagtcaaattggggattggatcatttgtactctcataaaatattttcagccaattcattggtaatggaaagaggcaaatgggaaggcgatgcagtatattaaaatgccttctctaacttctgacaagttatatagttgcttagcattttgtaataaaaagcagcattcaaggaaaaaaaggtaatataaagcacttacaaaacaattaaaatacattccagtttagatttcacttttctctctgctacacgctgtggagctaggcatgaatggaaaagtgagaagagaaaggctgaaaaagctctagaaagagaagtctcttcttgatatggtttcttgatgaaattagatatattatcataataacacttcacatctgtacacagttcagaaattacttctttaatttaatgtccacctacaaaagaaacccatgcatcttctgttctctaggtctccttaaagtagtgaactctctggatatctctaggtgaaatgaaaatcgtgtgcttaggctatatactatagctgtccaatcaatctcacagatattgtagttcctgaaatactctgaacaacacctaaacaatcctggaaacaattctttcaaggacaggagagctggtagtgaaaaaaaaatagtggttggaagatattcacttatttatttaaacaacaaaccaaagttgaagaatagctaaaatatcaggctaaaaattattatctgcctactctgtcactgactgatttaacttaatattggatagaaagggccaaaataatttttccttccatcttgaattttaatatttttttctccttattctctacagatgacttcagccgtgtgagattagtctccatgaatgaagaggaaggtgcagactacatcaatgccaactatattcctgtaagtagaaaaaaaaaatcaggcatcccaaagctaaccagccagagaaagactagcagggctatawggatgtgtcaaacagttcaaaagagagcctttcccaacccagcaattgaattctaaaaagtttgcattactccgtttcataataaagaatagaaagaaaaagtccatagattactaatgtttctatttctttataaaggtccagtgaaagggaaagtagaaaggttaaagatcacctctcttatgtttaaatttcacattcagcaaccaaattcaaagggttccaccctagcacctgcacttttaaaatataaagacagttattattgtcataaaaaggtgtggatgtgatttttacagccttctggataacaatgcttacaatcacacagactaattatggtcagttattctgatagcctctttgattaaaacaggagaaaacattacataggtgtgtgatcctttgccaattttatcaccagtaagttttcagtttttttcccataggcgtgaagcagcatttggtgttgacagtgtctggttaggtgataattttgtcacttatctttcagggatacaactcaccccaggagtatattgccacccagggrccactgcctgaaaccagaaatgacttctggaagatggtcctgcaacaaaagtctcagattattgtcatgctcactcagtgtaatgagaaaaggagggtacgtacttactgaaactgctcccacttagcagcaaaacctgccctagccactgccgttgatgaaatgcttgctgttttcaaagtcaaataaaacatagagacaaatcgctaaatttaaaacattgtattcrggaagcaagaattmgaatttgggggtaaacacacagacccggtggtctttgcaatgtctaaaggaaaaaagagaaggttggaagtcttctaaaaaggagaaatattgcatattgttttgcaggaaagttcattagcactagtaaagttttggggagctggcaagctctgattggtgaatgcatggtggtgggtaaaactagtctcagagtcccaacaggctgtttcagttgctgttagataccactggtttcaagttactaaaggcagtttcagcaaccggggcttacagagaattacattcctggaacaatgttatgcgttctgagtgctttcttttttttttttttttttttgagacggagtctcgttctgttgcccaggctggggtgcagtggcacgatctcagctcactgcaaacctctgcctcccaggttcaagcgattctcctgcctcagcctcccgagtagctggggcattctgagtgctttgtcccctgacccctcaactctgttttagttagatatgataagaatgacccaagtcatgtgataagaattcacactacgtagcagaaatggtttgctttatgtttcatcttcaccacggtcctatctaattctttagaggcgaatacctttgttttccctaagtgagcacacttaattcctttcctagcctgtttgttttaaaaaattgttttgtccttgctccaggtgaaatgtgaccattactggccattcacggaagaacctatagcctatggagacatcactgtggagatgatttcagaggaagagcaggacgactgggcctgtagacacttccggatcaactatgtaagtcaccaggcagagagcaggtgctgtccctatgctgacacctgctgagaccagtttggtcrgggagaccctaacccagcggcgctagaggaattacagacacacacacaaaaatatcgagtgtggagtgggaaatcaggggtctcacagctttaagagctgagagcctcgaacagagatttacccacatatttattgacagcaagccagtgataagcattgtttctatagattatagattaactaaaagtattccttatgggaaataaagggatgggtctggctagttatctgcagcatgaacgtgtccttaaggcataggttgctcatgctattgtttgtggtttaagaatgccttaagcggttttccgccctgggagggccaggtgttccttgccctcattgcggtaaaccgacaaccttcagcatgggcatcaaggccatcacgagcatgtcacagggctgcagagattttgtttatggccagttttggggccagtttatggccagatttgggggcctgttcccaacagacacctacaccaccaccaccagggaagtgctgggagaccaacccaatgagcactttgagctttgcattgctgcttccttcaagaggaaaaatccattctcagtgtcattgtttcccatttcatcagtgatggtgtggatgatatggttggtctggagaggctgagaagacrcagtaaaaagtctgcactagttcatctcgaattagctcaagatcatagaagacactattaatcattgtttatgaggcatcattgaggacagaagtgttctcattacttatattaatcatatatgagtataattrgggtatataaggcacacttatgttttaaattaaataattaaaccctgatttagtagtttgggttttgttttgttttttttcttgttttgttctggtttggttttcrttatttgtaaggtacttctaggtcttattatcataattccctatctctcttgaagggctattgatttctgatggataacacatccaaaaaaaatgtctgtttttctcacaaggcctgacacctttctgctgacaagtctctgagcaaacgctgaatatttctgtgacaggcttaggtgttaacatcaattgaagtcatgccattgacctcagcctatagaatatacagtttttactattaatagtcttctccacttgaacatgctgtctatgaagacaaaattgaataggaaagttctcactgagatgttcttccctgcttagaaacaatcctttctaatagttaaggaaatagcaaactgtagcctgtggaccaaatttacccactgccttttggataaagcccatgagctaagaatggtttttacattttttaatggttgaaaaaagacaactgagtatggtggttcatgcctgtaatcccagcactttgagaggctgaggcgagcagatcacttaagcccaggatttcaagattgcctgagcaacacagggagatcccatctgactaaaaattcaaaaattagctggtgtagtggtacacacctgtagtcccagctactcaagaggctgaggtgggggaatcacttgagccccgtaggtggaggttgcagtgagccaagattgtgccactacacttcagcctgggcaacaagagcaagactctatctccacacacacacacacamaaaaaaaaaatcaacaagaaaaatagtattttatgtgaaatgctatatgtaaattatgtgaaattcaaatttcaatgtccatatataacattttattagaacacagcctgcattgttgacgaattgtctatgactgcttttgtgctacatcaagcttgagtagctgcaaccaaaactatatgatctgcaaaaactaaaatatttactaactgtctctttgcagaaaatgtttgctgacccttaaaataggcaatggaaacaaagattgcccgtatcaatacaacgttagaacttgatactacctactgattgatctctacaggagataaatcacttcttagccattgttaattgccacttgttaactggcagttaacaatgtcttttatgaccaggagaattcaggcaaatccccgtatgactctaacaggctgtgtttcgtgttgtttcggtcatttaaaattcacattgcttccttgttaagcacgtttttactcaaatgcagagtttcagcttaagtgtcaccccctttgtggcgtcttctctgggcttggacaccgytagcccattccttctctggggcagagtcttaagtaagctgctttatcacagcacaccatagatagttacaattctcgcttcttgtgtctgcctccccagtatactgtgagtttcagaagcaagtgctgtatccctgtggaatgaataaatcagtgaatgaatgagttatttcaaaaataataaggcacttgtaaagcatcaatagactttccgtcagagaaaatatttgtcaatccaaatgccatttgaactctgttttttgttcttagatatttcaattgaaaagccagtgcaaactgataaccaaatacagtacaaatctgtccctaggtttgcacgtagtagaaaaaatttcagagcacaaaatagggtctgttccattgcctattctgttgacaaagaagagtcacatagattattgctkggtcagtactatgcttcttgtccttggtcttaagtgatgacctatctttcaatgacaatcatgtgaaggacttgaaaaataggaataaaacattgaacagtagtgtttgtttgtaaggaatttacttgttacaagcgtctggtaccagagtgcccccttttggccataagcataatgaatctaaatgttaagctacaatgaaggctaagttgcccaaagaacattgtgctatgctaattaatatatttttcaatttgtttcattttttgtttatacccttctttatccattccatattgatatgtggaaactttccaattataaaaagataaaattacataaataaggaactcaaggtaagagaaatttaggaatagctaagtaagataaaaccagaagagttttctcctttaacaagaaaggagagaaatgaccataacacacaacttgtcactttctactacttgaaatttggcatcaactgagtgagagctggagactaaagatcatcaaaaacgtgtttgttgccagggactttgtgccctgctattcagctcacagggctgaccccagttccaggacccctgccgtgtagctgcggagaaactaactacaatttaatgatttcctgattttaaatcaccttgcactttttaactgaatacattttcacttcaaccgtactggaatatatatattggctacaatgtacacatgttatacaaattatgatcagcatttaaacagggcaagcattttcctgaactttcctggcaaccaaagttatctggtggctgagtattcttaaatcctcatgatgttgaataagtaaattattctgcacaattctttatgcccaagatagtttctcaacatacttcctgaagagagcagtgagggtagccagcgtctttgtagacttcatgttctgtgtgtctaagccagagcccttgaacatagtaggggaggcactgcatgctgctggggatatattaggtgccaagggtacaatgggtgtaggggaggtgataacttatgtatatttaaacaaatcttacatatttatttatacattttatttatgaattgtctttatacgtttattttctgcccaagaccactgactctttgaaattcatttctctttcaatacctgaacttaaattttagctcaaaactgacagcgaggccaagcttccctccttcccagttatgatatagtattccagcctctgagtgaattctaggctcttcacaagtttgaggactgagggatgaatcagacctttatgaagcctgggtttgggatatttctgatggttgataacaagtggagaatatgtaactcttacaagttagttgggactaaaaagagttgatctggaaagatatacattctagttaatatgtactcagttcagagagaacaacaatatatttgatgtatgggttaataggaataggaaaatatacaagttatactcacttactggggactcccagaatcaaccatacaattgcacggagctggatgacggtgagtgatggtaatgaggtactagtaagtagtaatatcacacacatgattacacttaattcacacaacaactcttgttataagtatcattaggccatttttagatatgagaaaactgaagctcagtgagtcaagtcctctagtatcaaagcccaagacaaggattctcatataagtgattttgtgaaagtgcattcttagggaaagcccataagggagcaagggaagcagattgacagagaagaagccctacagagcattcagctgaaaatctcacctgtgctggatcccacagagagtgctgggggcatgaacagcaccatggtactgtctcactctgaaaaaggctggatttttgtaccccacaattagtcagtcattagctgtgggctkccctcagcaggagaacgcaacctcttaggcattttctatcgaggcagctctgtgcagtggaaggcaactatcaagagataggtactgctgtgctgttagcagcaactgggaaaagtgtgtcccaggctggcaaagtgtatctaaagggcaccaacagcactttctacagtgtttaattcattagccaaaactgatgcagcttctaaatgacagagccaggatgcaaaccctaatctgcttaagtgttgtccacaggtacagattagcctacttatcctactatttgaagctttatacaattagcgtggttttttttttcaatacctattttatgccagatatggtgctcaaagctggaaaggaaagtgtactgaccaggagtggaacgtggctctacctttttgcatgcttaactagcagagtcctgggtcatcctaacagtgaactgaaaaattaatgcttgtttttggcttttttctctaaaggctgacgagatgcaggatgtgatgcattttaactacactgcatggcctgatcatggtgtgcccacagcaaatgctgcagaaagtatcctgcagtttgtacacatggtccgacagcaagctaccaagagcaaaggtcccatgatcattcactgcaggtaacctcatcaactgcattttctattaaatattaggagttggttttgtaaggggaacagctcaccattccataagcccttatcaggtttagttgaaaattaaataaactctgatgttttttaaactatgattaattgatgtctcactatatacaatgtttattctggctttcctgtatctataccctataaaatagatgttattattccaatttttaaatgaaaaaaatagagaagggtagagatgttaagggattcacacaagttcatgcaactagaacatggaggagttagtattcaaatccaggmatgccaatctgcaaagatcatgcccttaatatgtgatattatcctactccatcaaggattctgggtagttacaacatggacaaatacaaggtcaaattatagaaagctgatcacagcttgacataatataaataggcataaaaactagaaaaggaaaagaaaaatgaaaatattcagcttaggaagataaacatatttgctatgattcctcttcgggattgtctcttaaattgtcagacagtagaatgaaaaaggatataggatataaaaaaatcaaggtccacactaattcccaacaggaaaagttatcattaaatttaatttgttcttcctactgtatgaacagagctccatcaaaatctatctctgtgatacaatattgctgtaaaatccttatgcaacctcaaaagaacaggggacataaacgtgctccaatggcaagtgagaggtggcagtgggatgaagatgtgaagggaagcattggcagccatgccaacctaagcaaataaatctacaatcccagacctactgccttggcccttgtgaattagaatgactagaatgaagaagtatatgtgtgcattcaygtgtgtttgtgtggagtgtgtgtctccctggaaaggaaaatgcttcataagctactaagtttctgtttagggcagatattgttgctgtcaatccactgtaggcattcacaggttaaaagatgtgctttagcaggtaagattatctgttctcaaaatggttcttttcaagaacagaaaatgaagctcttcaactctggggtcaaactcacagattcctttcatggaagatagtaagtgcagttctggatatgactttacaggtgctcacccaatggcagatcattttatctgagaaatcctgggagggaagagttgtctagtagaaaaagcaacccttaaactcaaggtttatagagtgggatttttctagcaaactttccatataaatttgcttgaactttctcttttcccatcatttcacagtgattcaaagctaagagccatttgactctttattgaggattagagggaaaaaagggctgacttcaacacatagaactagggactgtgatgggcagttggtcagcgcatgtcagtccacttccatctgtgccccgagcattgggattgggggactggctgagactgggtccaaatttttcatttgattttaaggcaactatctcaaaggtccctgtgagatggaagcaggcccaggacccactaaaatggcaggcatgctgtaaggcaggtctggggtggtgaactgaacttagggttgaagatacacaaatctctgtggtcccagacctagagttagggtatggacatctcaactggagttttgagctgatctgagggcttaactctgatgctgttcaaaagacagggtattgtttatgtgtatcagctctctgaattcagaaatcagttcccgagagtactcaacatggaatccctacttttctgcagaagcagagaccccgataaagggtgtggccaatgcagtgcaaatgtctctcaggaacgtagccatgatagtcagaaatgtgacattagaaggaacaccaaccacaactccatacttaaaaatcagttaagtggaaaatattgtcaggagcttagtctgcgtttttccacaagggtactatttgtagttttttagaaatcatcagttttatttcaacagtaaagtagcaccatctgggctggccgaggtggctcacgcctctaatcccagcacttcaggaggccgaggtgggaagatcacctgaggtcagaagttcaagaccagcctggccaacatggcaaaactccatctctactaaaaatacaaaaattagccaggaatggtggcacatacctgtaatcccagctactcaggagggtgaggcaggagaatcacttgaagccgagaggcagaggttgcagtgagccgagatcatgccattgcactccagcctgggcaacagagcaagactccatctcaaagaaaaaaaaaaaaagaggggggagaaaaaaaagaagcaccatctgaataatatgccatcggaacattcttttgcagtgctggcgtgggacggacaggaacattcattgccctggacaggctcttgcagcacattcgggatcatgagwttgttgacatcttagggctggtgtcagaaatgaggtcataccggatgtctatggtacagacagaggtaggaacataatctatatgtatttttaaattttccctggactgaaaaacttaccattattcaatgatatgcttcaaaacaattctctcaaacttctttgtatctttctttcccattttcttattgtatrtgttcaaactgctttgaggcataaaagaaatagacactagcctccagaaatccattcgacatatagtgattatacttttattggcatcataattcagagtgcatgggtagattcgtaagagtaaaacctctttgaacagactcagagtcaattgcagataacagccatcctgggtaaatgccaccaaatagagactgttgaactggtgaaatttgatttatatttgaaatgttggatttgattcaatacatttgtcattagtttatcctccgtgtgactctatcccaattcacttttgatgatgattagaagttggatttgagctttctgtcccttttatgattttaaagattcccagtccccaacctaccagcattgccagttcccttcatctcaatgatgaagatttattattttaacaacatggaagcatcccctgaaatatccaacagtgttacgtgctccgtcttcctcctcttctcccgagtcctccctccctgaaagcctgaggatgcacttagtctggagcgacaacccaaggcaacgccggcagacagcaccgcctgcctcagagcagccgtgggtgtgtacccttgtgggcgcaaaaacccaagtacaacagcttgttcataagcctcatcacccagccatactcgcgacttcttagcttcggtcttacaataatcctttttctcaaagagtatgtgtgggtggagcgcttgggtagaacacaacctggcccgacctgtaatcagggtatttttaaaatgctttggtcttcctcatgcttttcctacccagcaccactagatgtcagtatcacttcaaaagcctagagtaatggcggccgtctcagctgtttctgctttcccactccttttacttttctttcctcctacctccccattcttgtctgaccaatttttggcaaggctgtttcaatacattcatttctgaactacagcaggatcataccacttgggaaagagttatcctcgttaatattcagacctctcattgataattaggaagcaagtccaattggtttcctcacttggtttcaatcatgctgcctagtaatttagtgtggtggggacatcagtatcactttttaatcataagtttaaaatgtctggtttcccagaggagtccactgtctggtgagtaaacagtgctttattaatcggtccatatttttggcttttacttccataaatttgcaccttgatatgtgattaaaaatccacgttatgtatatgaatcaccaagcttcaaagagccacaccttattttaagtattttgcatttaatgaattgtctcctcaatttacttaattcataccttttacaacttcatagattttggggcctggcgtagtggctcacagctgtaatcccagcactttaggaggctgaggcgtgcggatcacctgaggtcagaagttggagaccagcctggccaacatggtgaaaccccgtttctactaaaaatattaaaaaattagcctggcctggtgatgggcacctgtaatcccagctactcgggaggctgaggcaagagagttgcttgaacccaggagacggaggttgcaatgagctgacatggtgccactgcactccagcctgggcgacagagtgagactccatctcaaaaaaaacaaaaaaaacttagtagattttaattatggcctgtttgcttttgacttttctccaactacagattcttaatctctttcacatgacacatcctccatcccatttttagggtcattatctttctttgggtggttatcaagcagccaccatgtcgctttctgcaaagccaagaaaacgttttgttttctccctaaatgttttaccctaaattttggttgttttatttgtttatgccagcattttatgttgatatctccgcggacacagcctttttaaagtacagtatccccatcctggccaacatagtgaaaccccttctctactaaaaatacaaaaattagctgggcgtggtggcacacgcctgtagtcccagctactcgggaggctgaggcaggagaatcgctggaacctgggaggcagagcttgcagtgagccaagatcgtgccactgcaccccagtctggtgacagagcaagactccgtctcaaaaaaaaaaccccataaaataattaattaaaattaattatgaaataattaaataaaaaataaagtgcagtatcccttccctgaactctcatggggagttcaaagtcagcaaagggggcagaggttccccgggttacttactttttccaacttttctagcttgacccttgattcccgcaggacttcctggtggatgttttccagttccagttatttatctgtgtctttttttttaacttatgtctagaacatcttcttcatttacctttattttttccttgttcctctgcttaccatggttcatcccgtattttgaatacagattgatctgcctaagattctccttaagcccattcacattcaaattctgctgccaggtcacaaaagttaacaaggaaagaacaaagtaaaaaaaggttattcttttcacatgtatcatcctagagtactcctttgacrctaatgattttcaagagaatgaaatggttctccacttgagctctgtttttatgtatataatcaacccacatagaccatatttcctcccatcactggtatctaattttccagccttctctacattgccttgaccccaccattccacctcacccaaaaaattgcagaagtagctgataggatgagccatgtctccaggtgcaacatgctgcctggactgcactgtgacctgccctcttcctcttcctcacctgaccagacacacttcatagacttcttcacgcaagtagaggcgtatttagaaagaatgccagaccctgaggggagcctgaatctccactttactgctgcacaagtcatgtcacctctcaaggctcccatttctcttctgtaaaatatgaatgataactttcactaatttttgtaaagcagacatgatgggaaataatataacctagataagtgatttgaaactgtgaagtgctacttatgaatgatgttctcctctcttctatttttatcgaatattttgtttggttttcctctaatatccttccctggaggtcagttggggctttgctttgagcagcccatcctcttgatctgcagtttgaatttcgggactttcaaggacaagtccctccataaatagtctttatttacttttcttgtggtcttgttgtttggttgttttttgttttgatacaaaatgtagccactaagcagatgcagattgaatgtccaggcaatctctggtcttatctattccctgtgttgacataacaccagaaacaatggattaggtgtccatgtgtgatgaccacaaggggtagctcagccactgataggataccatcaccacaaaagggaatatattttctccaaaccgtgttgaaaaatacaggttaggctgaggcatcaatccagtgatgttcgaaatattaattttgttttttgtatgaagttgttacacaggaagcttcttaaaatcctatgaatattttgaccggatctcatttaaatgttatttctagtgctattacttatagagaaactctgggaaacaaagaaaaaggaggaacactgtgaaattacccttacttcttggcagaaagatatattttggtgatttcattttggctttcattcaagtataacttttacatgattgtgctcatattatatgtatgtatatatgtgtgttactttacattctatttacattgtagtttctcatttaggattttactatgtagcctgtatagtatcaaaaattacctacaactctataaatctcattttaaggacagactaatgtttcattaaagatacactattgcatacttaaaccaatctcctttttatagaacattaaattggattattttccactttttactattatctgtgtccacaccatttattagcactttattaattctacctccacaaacaataggtaaaatggactgcctcaacaaacttgtcatcattaaatattattcttttccttctagctttgtccactacatagatagaaaataattatttcaatgtactttgtattacttgactattgttggcatattttaatatttcctcagtttacttcaaaaatcatttaataaacacagctaagtgctaagcattaggaataaaaagacatagtttctaacttccagggaatatttggcctagtggttgatgtcctttacttatttgtctatttgtatatgttactgatttgaatgactttatcacaaaaataaaggcatcaatattctgtcataattctagaaaatatttttctttyccagtttgtggtttaccctgtgttttattctttttaactttttaaaatatacagtagattgagatttttatttgtaatgtattctactgctcttaattttagaaattcctttcctaaaggaatcagagagaaattaaccaatattttcctctgtatttttaaagacaatttattaaattacctggaatttgctttggtgtatgataatgggatatcctttttttttcaaaatagccccatgatttgattgaatattcatttcctttagcattaataatgatttaatgtacagcatggtgaacatagttcataataccgtattgtatacttgaaatttgctaggaaagtagatcttaagtgttctcaccacacacacacacacacaaatatatatacatacatatatatgtatatatacacacacatatatataaacatatatataatctggggtgatgaatgtgttaactagcttgattgtggtaatcatttcataacatatatgtatatcaagtcatcacattgtacaccttaaatatatacaatttttattatactgcaataaagttaggggaaaaaaattccactgtttttttaaaaaagccatgatgttctaagctctgttattaatcaaaatacttgtacagttgattctcttggattttctagttataaaactgtgtctctgtaaataatgaaaatggtttcctttaacaccagatcttgatcattaaaattgtcatagtataaaatattatatctttgcacatgtctgctctgaaacctgtttttgtcttttgttccaggagcagtacatttttatccatcagtgtgtgcaactgatgtggatgaagaagaagcagcagttctgcatcagtgatgtcatatacgagaatgttagcaagtcctagttcagaatccggagcagtaagtggagaagagctctccacgagtgytcagtcttagaactattagagggggatgtgatggatgggacaaaagrcagcagtagccatttgtattgactctgacttcacatgagtatttcttcccagctcctggcctcacatgggtggtcacagggagaaacaagtactgtagcagatctttgagtttcaatgcaccttggttggtgttggcaacaaacaggagcttctgcacatcatgatgactttacctccattccctctacccagaaccctaaattattctgttattggatctgtgcctgtaatatcaggatactaccatccaaatctatctagatatcttgtgcaaatattttattgattacaagggctgtatacggggttacaaaaagacatgagctggattggacactcctaaaaccaaaaacaacagtgacaatagagtctcaggatagcagagtctgaaaataccttggtctcccccattatgtgagcccttayttgagagcttcatgaagacacttgtaacatattcaacgtcctgtactccagttttgactacgagatcagattttggaggtgtaagtaawcttggctgaggtaacagtaatctgcccatttagttcagtaaacagactgtagagtgtctgactatactgggggaagaggagccaatgacagggtagggagatgacagtggtgcatgatgggagaatcatgaaagtctgggaagcatatggaccagtgggaaggataggattagcactgcacctctacatccatcaagagagacagagcgcacaatggagcaggaaggataaaaaataaagaaagacagagacaaacaaatttgctgggagagggaaagacattcagacccacagaaaggaggcagcacacagagaaagatgcacagatcaacccacatctgcatgggttgtgagactgagcatagtgagagcagtggtggagcaatagaagattgctgtgacaccaggctgcttactgtctttctttgtctcattcacaggagaggacatgatgtgcgcccatcctcccttgcttccagattgttttagtgggccctgatggtcatttttctaaacagaggccctgctttgtaatatgtggccaaggagataatttatctcacagaagcaccgggaagacttagccttaaagagcctacagtgtccttttggactctttcacttcgggacatttaataatggaccaaattcaacagaacaccaggaaggtcaagacgctctccaaagggcaggaagtacagcacttccgaagagtttagttggccctttgctggttgggctgagttttttatttttaagtgtttgtttttcagtgcaataatttttgtgtgtgtgtgattcttatcagaaagttgaattgttttctgcctacaccgttcatcagccccataacccaggaaggaacaggcattgttagcatcagattatacctcattattaaaaggaggcatggccacacatgaagaaatggtcattctacttcaaagaaattgagccagcactatctgtactccaacattaccggatctggattggggaggttggtcagggaagagaggggttctacccacagatcaactgtgtaatcttttactattcaagctataattcagcttcaaagtagagtagaaaaaaaattgtcttaactgttctagttcttgatggttttcttccttattaacagttggtgtttcttccttggcccttttggactaatgttactgtccaagttctttctcaagaaaccacatctggttcagaagagtgtcaagttggactctttgaactctgttgctgtctgagcaatcgtggtgcstagactttgcattccttgttctgttgacctgcatacatgtgagagctatttctttaagaactatataggctgtgaaaacgcactttctttcccccaaagagctgggaatttatgaagttatggcaatgaactgcagcatgctgggacaattatttgactacttttttttgtaatattgtcaaatgtctctatggattctgacagagatttctttttgttttgttattcttttggttgtcagtttcattttaacgagtgtaactagtaacattttattctttggattttgtataattacagtacatgattgtgtattgtgacatgaatgctgtcaaaatgacattgatggcattgtgaagcctgttactttgtgtcacttcctgataaataagaggtgatgacatggatatacaacagaaaacactttgagttgaaagtaaacacaagctggctgcttccctgtggcaactgtggctattgtgagcctccgtgtgtgtgcttccaggaggctttgctcctcttcatgcacccaacactgccccttccctggcttccctccatccctgatcatcttcatgaagccacagatataagatcagcttaatattttatcagtgaccttagtgttggtgaaggatgccaaatgaacagctctgcaccccaccgtctcttgtcactgaaaaggcttggccatggcagaccttggcagagtttcttgcaagatctggccagtgagtctcagtttcaccttgcagggtgaatggcagaggatgcccataccctgcaggttaacagcttgggctcctcaggggttgtcagttcctactcacctccctgctaccacctcctcctcttcttctcacccccgactcctttatttccctttttggacattttaataatatgtcgcaccattctcaggaacaaacatggttaatgaaaggtggcaaagggatgtgtgacattcttagattttcacacatgggcagtcaggagtgaaatgtgcaaccttggaagagctgatacaatgtatggtaagctgaagtacgtttccaacactgctgctcagagcatacagaagttttgcatcctggaacattgcttcccatgaaacaaagcacttcataaatattttatgtttttcttgagcaccctttcaaggtagggatcaaatagtgccagatcaattttcccaaaaggaaagaggaagtatccagagtttagactgaaggcttagagtcaaaactacaggaaggtcacactgttctctggaacactgttgctcttcagtttgtagagtttatgatggaaaaggcatcagtctgtcaaaagacttgtttaatcctgataatgactttggaattatctctcctgggtctcagttaataaactgaagaatgacctaatcataactccatatcttgcaacaggtataagaagtatcagatacgataattgacccaaaggtgctttgtgtcttgttctctcatgtatgttccgtaaggctactctaaccagttctgtttccacaccaggacccaaatttaagcattcagaagggaggcttccagagcctctgtattattaactagggtttttaaaattcatttgagtaatgctttgttctaaaagaacacaggggccttagtgcatgtgttcataatagcctgtatggcacacaaaaagatctaaaaacttgagcgttacaaaacatttcattttgagtgctattttttttttctttttttttttgagacagatcctctctctgttgcccaggctggggtgtattgatgcaatggcgtgaccttggctcactgcaacctccacctcccaggtttaagcgattctcctgcctcagcctcctgagtagctgggattacaggtgcgtgccaccacgcccagcgaattttttgtatttttagtagaaacagggtttcaccatgttggcctggctggtctcaaactcctgacctcaggtgacccccccacctcagcctcccaaagtgctggaattacaggtgtgagccaccacaccaggccttgagggctattgagatcaaattccttggctgcaaaagataatttatgaagttaattgagaaactaccattaggatctaattaataaatgtaatagttgacagcagtatatccattacttcatatgatgatttcgtttaacttgaaaaaagtgatggatgacagcattttttggaaaagcattttaattcggggtctacaatttcccactgtaaagacaacattgcctccaaaatgtaaaactagaaaagttactacttttttttaatgtcagattttataatgtctctcctttcctaaaagctgttcctactcccaaaaaggtgacacagctctcaaatgaggctgtggtgtcaacaggcaaagcaggatcagatgctttggatttgaattttctgcaggctacttgatagctgcttgctaraggattggcccttagccaaggagttaaagttactgagtccaacctctaagagccaaaattctccctgctttctagcaaggaggccttcctttacacctcaggaaatgtctgatgtaatgtgcttcaaatagctggctcgcttcctagctcacagatctctagtctggtacttggcacagcgatgaagtctgagagtcatgcccatcgctgattataacattcactttggccaaaggggttataaagcaacaaaatataacatgcaaaacctgcagacttccacccctgacttctaatagcctcatttggaaccatttgaaggaaatttcagctgtgacatctctgacccctggccttccagaacagtaagattttttgcttttagttttatctggtgattatcacaaggccttttcctggtgggtcactggattaaagatgaagtataaggtttaactctgggagttgcattacaggagggtcatgaacagactgaaggctgtccagacattgtcactagaaccaccggaaatgtggagaaataacaggttatgataacaaaacctgggaaaactggggctattaaatctggagtaaaggaagtcatttattgaatcactcagtcaacaaatgtgtgtttatctaatcatattgtaggaatcactcaatcaatccatctaaggtttcttgaccacttgcaatatgctaggccctatggtaagcacaaatatgaaggcttttaaaaataggctatataatcagttttaatactgttgttggaatgttcaagaaagccttagtcaagtctttttcaacatttttatttatatcttccaaaacttcgtcaacctatcttctggacatacccaccagccatcatatttaatgatgttcaatattttcctcaatggcttatataacagaaacaacaaatgttcattgtttttttactcataaaccactagaaagcctgacatgatcgctcttgcttgatgagagtcaccaaactagtcctgccctcctgctcataacaagagtctcctccaccgtgttcctggtggatggctaattcttttctacagaacacttttagagggaggaattgcttctaaggtagcaaagcattttttcttttgtttacacatccaaggaccttactaatattaagaatgtatgagtctgtgcccctcatgggcataggcttgaagcccaaatctacttccccatcttggaaaaaaaaaaaaaagatcaggttctgtggctgctttgaataccggactggcttctcacttggcagcaaaggagatggcacctgactcagggagcaatgggggtttctttctaatgtgctaatccctttatgttcatatcctcaacttcaaaacatcattaggaagtgagaatactcatttcccaggtgacgaagttgagagacaataaggtgaagaggcagcgtagttaaattacaactacagggttagaaagtggcagaagcaggattcccggccagctctgcccagccctaaaccttttcccccacaacttcatgctgtttctcgttcatacttagcatggataaagtgcagtaggatggaattaatagattcatctccaggtaatgtgtttaatatagagggcagacattcaatttgagaaatggtaaatctctaaccttctaagaaaatcatttatttattgaacctttcatgccaggcaccgtagaaggggctatggctatgaagatggatgcaacaagattcttgcttctagtttacattctaataggggaaatcagaagtaaaaataagggcaacaaagtgtaacagacaccgtgatagaaacacaaaaagtatccaatataggtccaagggaaggataggtgatcttttttttctagaagggtcaggaaacactatactactatattaaagtactaataactatagggccacattaagcaatactaaagaggaacattcattgctcattcagcaaacatgaaacacccagtatgcatcagtcactggggcccatatggatgactaatcctcccaccctgccttctgaacctattcttcttggcaccttccaaggggaccatttctcttaagatgtccacaaacagctccagctcatgtatcactcagcagaatctagtggatttactcttactgcaaacctaacagagcatactgggactacttttcaagaccctttgcagagttctgggcaatggaatgtgtgcttcctggcctctggaccatgaaaattacccaggagcaaccttccattccaccctcccccacccctcttctttcttgtctctctctctctgtgtgtgtgtgagtgtgaatgtgtgtatgtctctttctctctctccctctcctctaccccaacacagatggtggtgccacagataggaggactctgggtccctgaatcaccacttggggcagggatatctggtagcattggcccattatgtgatcaagaaatagatttctattgcattgtcactgaaacttggtcattgtcagttacagcaatcaacctgcccttaactaatatggcagcacaaggataacctttacaacaatgttccgtctaagttacaataggaagttttcagagcaatggtgtgtgactgcccagtaaaattcccagaagacagttaaagatgaagcagtgcagagcaaagtaaacccacaatgcaaaacaagggttcaggaaaggccacaaaagcaataatggttcctttaataaataaactttttaacagaaatatatgaattcttctttataagttgttttcctccaggttagatctctcctgatcttttggttgtcattgcttttcacaccccatcataagaccatgactcaggacacccactagaacttcttacccttacactaggccattgcctctgaatcagactcctggattcctattaacaatataccccaaagtggtttcacatcaacaaaagctcacacatacaggagcccatgaggcttggtgtttggagtgatgctgggcaacccaatcctttacattttgtgcgtgtcctggtgcgttccagggccatggtcacagttcaaagccagctgacacgaaatatttttgttcagttctaagagcaccaaaaagttcaaagggcagtttaaactagaaaaagttaactgtaaccactacatcctttataaatataaaacaggatggtcttagaaaggttccttcatgtccaaaaccaaattagatcatattgccccttaaccaatgaacttgggaagtgacacaggacagggtccagcaggacagcagagcagaggggcttagaataagggactgtggttgaagagaggcttgagctaagtctctgctcctgactacatataactcagtcatctaatctatgaaatgacatcctgatggtagctttcacatagggagtcttagtcagggctgctgtaacaaagcaccataaactaggtggctttaaatatttcttacagttctggaggcagtaagtccaagatcaagatgccagcatggtcggttctggtgagagccctcttctgggtagcagacagctgccttcttgtatgcttacatggcagaaacaaggcaagagagctctctggggttccttttatctgggcactgatcctattcatgaaggttccacctttatgatataattacttcccaaaggccccaccttctaatatcattacattagggattaggatttcaacatatgaattttgggggcaaattcagtccattgcatagggcatcagaagataacatgtgtaaggatctgaaaacaataccaggaatagtttagtacattacataccaccctgttacaagccaatctcccacagtctctaagggccatcctgatagtcttcaatagacttggtaagagcatctgaagctggtatctgacctagactgactgggtttttccagggtgacacctgaaccccctcccctggcagcta

SEQ ID NO: 95258 - DNA, 62610 bp, Homo sapiens
taattgacagccagcatggcatggcagcaaccaatcagaatcaacactggccagagaaccgtgccaggaatcaaccttttgattgctggattatggggcttgggagcaggtgatggtaagaaagcctggaaaacttggaagtcaggtgggaggtttttgggagactggggcagtggctatttactaacccgtgagaaagcactgcagtattttcacagctgggaatgctatattcatatgaccatcagctggctatcagccctgcataaatgaaaaggtggttgtacatgttaacgtaaaacttaaaaacacagttcctagtcagctgggcgcggtggcttaccctgtaatcccagcactttgggaggccgaggcaggcagatcacgaggtcaggacatcgagacagtcctggctaacacggtgaaaccccgtctctactaaaaatacaaaaaattagccgggcgtggtggcaggcgcctgtagtcccagctactcagggggctgaggcaggagaatggcgagaacctgggaggcggagcttgcagtgagccgagatcgcgccactgcacactccagcctgggtgacagagtgagaccctgtctcaaaataaataaatagaaaaaaaaaaaacagttcttaatacttagtgtgtatttaacagatataagttaccattatcttttatggttttattacttatatggcacttattatacctggaatatagggctgaagagacaaagaccaggaccataaattcatagacacccccagggcttctaaaataggattatagccagagtattaatctagccataggaggacatggatgtgaatatagaaagggaatctgaaattgggagatgagtcaaaggggaaagaacagacatgatataaaccaaggttagagtgaaactcacatgttatcttaagcagaggtggaacaggtagttattatggggcatacaaagtggacaactggcagagatcaaagagaaaggtattcaactattcaatagtagatgtcaagaacccagatgtagggatggggatcaaattagatgtcttagtcagtttgagctgctataacaaataccatagactagatgacttaaacaataaacatgtattccttgcagttctggaggctgggaagtccaagttcatgccagctgattctgtttgtggttaaagccttcttcctggttttcaaatggatgtcatcttgctatatcctcccttagtggactgagaagtcatctttctggtgtttttcttataagggcactaatcccatcatgagggttctaccctcatgacctaattacctccattccacatacgattacattaaagattagccttcaaccaatgaattttggtggcatgcaaaacattcagtctctgccattatgtgagggcccagctaataaaggtggtcagggacaggaacacagccttggggaaacttggttgcactagtcacagtgttatgatagaaaataaattgatgtagaatggagattaaacttcttaaatacaagtcctgaaattatttgtgtctaaggactgggctgattacagtgtatagatgaaggctaagcagacatttctccagttgctaccctgatctgtatgggaagagccaaacaatgttaggggatactgggaaaggattgggtgagaaaggaaggcaatgacttgcagaggggctggcctgggaaacagaagtcagcaggcatggaaattgcctgctggggaagtcattctttgtcaactcacactcaccagtaattcctgcctctagcccatttctctctcattcattgacgtctgctccccaagtcatgtaactgtatggaagcatatatgcattaccccaggaaaggattatatacatttattaaatggaaacagagctaattgtagaaaacttaactttaaaaaaaatacaaaatactacttaaggtaatgagtgacagaagtgtagcctgcaaatctgtcattgaaccactgctagaaggaagaggaatccagctgctggcacctctgtggtgccaaatttgagaaaacttcatgttttgtaacccacagcagtattgattattttctgctgccttctgtgggaaccagaaataattgtagcaagaaggctggccacgggcaataagaaaaaggggtttccaagtagctcaggaaacacaagggaggggagcatctattggctggaacctcagggtcccaggttacgttttgaaacctgcctcttcttccacagagctctggccagtgttgatgtggagtaatggggaacgtttcttcatcccattatcagtaaactccaaagggaagtcttaccaaactgcctcctggttgctgtcatttctaaattttaagctggtgagtggagttactcataaagtgggtactttgtactcaatgacttaaataaatgcatatttatttatatctttaaattagtttctttaggcacctcctgttctaagaactgtcacagttaagctgaagagggtaagctcgagctggaaagatagtttctgtttcttgagtttaaattaaatccttgacattataaagcattacggatacattaccattgtcgrttttgtcctgttcatatgtttttgctattgcattattcagaatcaagttaaaaattcttttttattgtgtttgaatgtttctaggatgtggacagatcaatatttctagcctgtgcacacactctacctaagggctgtgagtcatatttgctttgaaagaaatagcacttaaggactgtcagtcaagtcagttgtaagaaacatagaactctttaagaaatactctgcctcctcctcacatctaaatatagctaaccggttggagtgtctaagacagatagtgaagctgtatttttaaaatggtgcaattgcaattaatcratgcaaataaaaagctctcaaggtctttttacctatacatatcaaatatgtaacttttattaaattaaaaattrtataacatgatgagtaatgaatatgcataaggaaatgacccaggttcttcaagtcatttgtaggtcaatattacagtattttacttttatggatccctataatctggttgagaaagcgctgggcaggatgtgtgaagatgggatttctagtatccacttggccattgcttaagtgcataaatctggaaaaactactgccttcgtctctttcttccaaggtctgagtttcctttcagactatgggttaacagctatgtattaagaattaacactgtatcttcaggttcatttcctatgtctctgtgagaagttggagttaatatcaatatagcttgatatagaaacaatcttcctttaactgtacagctggtttacccaattaacatctgtttaatgctcttgaaagtaaataaaagcaaaattgttcctcttgtgtctaatatactaatggcacaacaacaatttatccagtgactacttaccttaggctcatctctgtgctgggtgtgtgtatatttgatctgctccctgtatgtacttctatttacctgtcacataatttatatttggattcttctggcacattactgccaggagtgccaataaagtagccatactgtgctctaatatccttgattatatttgtaccagtgtctacagaggttacattagcagacggaacaatggactgtaccattaaattagcacaattttgcagcatcgcctggcagaagctcacatttaatccaagaggttattcaaccctatccaatatgattactctataaatatttgcccaagctcagcaccagccgttacatcactaatcacacacaggtttgttacagcgaagacccccaatgtcagcaatttgaaaaacaaagctaattagttttgatttagggatgagaagacttattaaattgaaagtgaacagtttacttagtatagtggctatttagagcacatatgaatatgaagatttattgttgtttgcatgggattttgagtaggaacggaaagactaagctagtaattcagagatatgtgatggccaatggctgcaaccagtgatggctgggggacttgcggggtggggggttaaggggagacaatagaaacacccccttaaaagtactactccaaacaaacatacatctaagtaaatggtatatttgcaaccagctttaggataagttcctgattccccttcccaaacagcactgcccctaaatttctccaacagagaattctgggaccaacactagtattggtccaaaggtggcaaagaagcctcttacccctacgtctctcagccaccagcctactgtgacgcttgaatttgttggttttattcttatgtctgcagccgttaaaatctgttttaaattgcaaagatcttagtaacatataaccttatcaccatgaaatagtgcagtactattttatttattctagtttttgaaaagcaatgtcattcgatgaagaagacatttaccctgaggaaagaaagggaactaacattaattgaacctttgattgttccaatcaagcactgcattaccctctttaaatattctctcatttaatttagtactcataattttattcggtagggattattatttcttccttagagatgaggaaactgggacctagtggagttaaataacctacctgaggtcatctcacactgacttcggttgacagccagcttcttccactaacaattgagatcttggataagttgcttcccttctgtgtgtcacttgccttttctgtgatgtaagaggagtagatgaaatcactcatcttccaacttttgtgattgtaccattttattagtaaaaaagaaaaaaattgagcatgtgccctttaatatattgactattttaaataataaatatgtagcattttgaatgcattcatttaagaattatttcttgcaaattttacactaacaatatacacagacctataaattttaatagattttccccttgacttcaatggatcaagattcctgtgcaccctactttggagactactagaatagatggcttccatggttcctacaagttctataaatgtatgattgtagggtttctggtcagctttgtaaatcacagaaagaatgcactgataaaaatcttattgacataggtaaattctgataaagaagccagagaagactggaaaaactggaccaagaaactagttccgttgggaaccctgagtaaggcaatttgaaggaactggaaactcaacaaatgagaaagaagaagtcaggatcacagactattgatataatcaaataataataataataacaaatacaagagaatactttctatgtaccagtgtgtccggaattgttccttccagtgggttcttggtctcgctgacttcaagaatgaagtcacggaccctcgtggtgagtgttacagttcttaaagatggtgtgtctggagcttgttccttcagatgttcctgagtttcttccttccagtgggttcgcttgacttcaggagtgaagccgcagaccttcgcagtgagcgttatagctcttaaaggtggtgcgtctggagttgttttttcttcccggtgggttcgtggtcttgctgacttcagaagtgaagctgcagaccttcgcagtgagtgttacagctcataaatgtagtgcggacccacagagtgagcagcagcaagatytattgtgaagaaggaaagaacaaagcctccacagcgtggaagaggagccgagtagattgcccctgctggcgccagtggccagcttttattcccttttttggccccacccatgtcctgcttacagagaactgattggtccattttacagagtgctgattggtctgtttttacagagtgctgattggtgcttttacaaacctttagctagacacagagcgctgaagggtgtgtttacaatcctttagctaggtggaaaagttctccaagtccccactcgacccaggaagtccagctggcttcacctctcaccaggccctgttttaagcactgtttatttatttaatcatgacaaaaatccccatgaggtaggtacaatgattatctctagtttacagaagggaaaaatgtggtatagagaggtaaaataacttattgaaggatgkgtgtgtgtgtgtgtgtgtgtgtgrtatatatgccatctatctcatttcatttaatactcaataattttattcggtagggattattatttcttccttagagatgaggaaactgggacctagtggagttaaataacctgcctcacgtcgtctcacactgacttctgttgatagccaccttcttccactaactattgaactgrattggttccttccggtgggttcttggtctcgctgacttcaagaatgaagccgaactgaatatggcagttctgaatatatggtagaactgaaattcaaccccagtcaaccacctggttttagaaataaataataaaaggaagcagaggaacaaagagtcatagaaaattgctatttcttagtggacatttgttcatgcctttagaatacaagcgtctctaccccattcttaaaactcttcccaggtttcccaattgataggtgactaagattcacttccatccctgcctctccaggwaggctcatctagtgtaagacattcagtgcatttcatctaatttcagtgatagatatcagatccaattaagacaaattagggccaagaaggtttaattctgtgacttagtatgcggttagagtcagacatgtcttccaaacttgagcagagagtttgcctggaatgcagtcaacaccaaggaagcagggcagagaaatggggagagatcctaatttcattttatgacacttgattcaagcccttacagaaattagatatacctgtgggccacctaattatatgagtcaataaatccattttagttgaatttgtattgggtattctcatatctgcaatatagaatgttttamcaaatatacagagagaagtcaggcagggaaagatcccaacgtctttgagatcagcttcaggatgcaggtagttaccatggtctttcatattcggaccatggcagctgactattagatggatccaggatggcattgcagacattttcttgtttttctatgtgcagagaaaagtctggttgacctttgctggcagatgaattattgcctacttcatggttttgcctaggacccgcctaacgactaacaagttagcagaaggatgtgatcataatcaactaaatcacaaccagaaatcttgaaggatttatgatcaaagttgtagtaatagactctacaaaatcattaattgcaaactccaacaaaaaataatcttgaaagaatcccctatataaacgtttcactttttttctcagtccacgtcaatctccgtatttctgatgattcttttgctcatattgtccctgatatggctcccttcccctgactttctatgcagtggtactgggaagagatgttcttcaaaagcatttttttttgtttattttcaccaatgttgatctttcctttttctaagccactgaagttgatattacctgttctacttatgagcatgtagttatttgttgtcttagtaccttgtacagttgtgtgtgtgtggaggagaaagcaagagagaggtatcaccccacctgattcttagaggaccaagatggaatgaactcaagctctattccctgtacattgagcaagacagagaaaacagaaaaatcggtggagagtctaggtttgttgctcagcctgagagtggtaaattcagacacagacatgtggaggctggagtgctttccactgcaaaatcaggccaaatgtggaatagtcaggaaagatgtaaggatcttcaggttcaaataaatcttcactgtctgtcaaaggagaagcaatataggtgatgagaagatggctgaacaacaggccagacattgaggacaagccctgaggaggtccggagcatagccattgagtgacaggggttcttggtaggaaagcctttgttgggatctggaatgaagcaggaccctagactttgaagactaggtgtaagcagagtgtaggagctctaggattcaaatgggacatatgtcacaatctgaaattaggtccaagaaatgcaatgctctaaaataatcacaaagaagaattaggagagtgatacaataggcagatccttagactaagaacatgtaagttctagttactagctgagtaatgtaggtcaggttacaatagcctctctatgcttcaatttcctctccagttaaaagagggagctggactagatgaaccccaagatttcatggagatgcttctgggatttcctaaccaaagaattactcattttctccaatcattaaatattttagaccatccgaaagatttgcatattactataaattattttaaatattaaggttatctttaatattttatttgaacacagaatcctatgggaaaatatagtttgaaaaccccttgatctaatgctagcagaatgtgtttcagtgataagaatatgaggattgagatatctattctagcaagtaatcgtaggtggtaagagatttgtaagttttgttgttaccacttgagaggatcttgggagtaaagggcctaaagtactgttggtaaagggcataatacaatatttgtatttctgatcacatatatttattattgcattgcatatataaataatacatatcataatgaacattttcaaaaatagagataaggaagaatatggatacataaatatacacatatgcatgtatatatgtatatgtgtgtgtgcgtatgtttagtttttcagcaaacttagggccatggtttatattcaagagtgagttaggatggtctagtakgagtgttaaaattacaaaagtaatcaaattacaagataaagtaaacatgtcataaaataggtaaatataatttgctacaaaagttcagcagagaatgacatcacgtttaaccgagtgagagcttcagaattaagaagcagtaggagctgggttaggctgtctggattttagagagactgatgtaagaaggaagacactctcggccaggacagaggacaggtatggcaatgggagtaggtggaacatgtgtaaattaactacctccacacatttatcctctcaacctattctactttctctgcctcatcatgaatttcatatacagtcaagatagcaataatttttctactggccccataatacctattttgtccttcctaagcccttgttcacagggattgtgaaggagcaagtcttcatggtgttcacaggaaaagtcccgtcactgttaacatggcacaccctatttacagatctcatttgaagcaagaagcaattcattttttttwaaatcaggataggagctttaaagtctatcgttatatttccaatcctctttgaataagagaacagaagaaaaggattttgctcttacaaaaagatggcagacagggagggtataatttttcacagtcagtcagcatttaaagatgatattgaaaagaaaaacatttctatataagtcacatatagacttccataaacagactgctctatgagcaaatctccaattaaagattgagacttcccaatactggttctgtagtaagatgtagcataggttttgttggcataaaaagagtagaacacacagaagaaaaatccacttggactcaagttattgccagttattgagttattgaatcaaatgattgccagtttcttcccaaggagaaactggaactgtgatcgaaacctgctatatgttgattgtacattagttgtttaaccaagatgtggctgtacttgagggacccctctcttctcaacccatctgttgaagtccagctccacactctgttgattcacctaggccaatagactagacttgcctaggtcaatgaaaagaaaatcaattccctaagactttacagagagtggaatactttactaaagacagtatggggaaaggagaggagccttatattagacattatgtctaaaaacttaataaaaatctccgttagaaaagagaggctgggaggtgtgagtggggaggacaaagagaagtgagttaaagggtacaaacatacatataaattcagtgtttgatagcagaatagggtgaccatagttaaaaaaatatattgtgcttgggatatgggcaccttaaataccctgctttgatcactatgcattagatacatttaacaaaattttacatatacctcataaatttgtgcaaaacttccttcctttagtcacatctgttcttcttctgatgtcacatctgttctgcctctgaagatcatcttactccccagctacttcatctctgtctcaaccctttccccaactgctcctgaagtctcactggctctgcctcctcaccaggtttctgttccagcaaccatctcctctttttatctcccttctctcttatctagacctggctaaactctctcattttcagtagccactttcttttgaaggtgccagggatcgcaaattactgattttcgtaggtagaaattttgaattttccttatgtattctaaggaataatgtttattttcaagatgtctgcttagtgattctcaacaaatatttcacattctcttcaaagagggaagcttgagtgacataacaggtactgttaacactgagtgcaggtgaatcttacccagctcttacagtcaaaatcttgacatcccagacattgtcaaactaggtagaaggcccattccatttcatgaatacttcaattttattgcaacatggcattgtctagaaataagattggaatggtagactaggcagaaatcattaaattgcttaaattccggacaaggggagccactaagggtttctagtggaggagtggcttattaagagctgtgcttcagaaagttcaaacagacagtcctggggaggctctgtggaaatggagggtgaagaaggagaggctaaaactacagaatccagttaggaaactatagtaatatttctatggtcactcagaaggtgtcctctgataaaaacctgagataattatcctaattctaccatagcctggaaaaagcattactttcactctggacaatttgctatttcttatttgggtttccacctaagaagggagtaccttataaagcagactgagtagctgatgagcagaaagacaaaacgtctctttttaccgattaaattggaattctgatttataattcagcaataataaatatatgactatgaagtcattctgaagacttgcataggccaataaaaaggaaatatttaaaattttttcacacttaaacacagagacatctgtgaaggctcagaatttcagcccactcaccttctagtcagtcatacttcccaccctccctttgtttcttaattgccatataacattttaaggtcatttcgtctgttcttcagtttcctatctacgaaaggaagataatacttatcctaaagtgttattttgagaattgaattatcagtagaagagaggacactagaaaaagaattgaagtgttataagaatgtaaagggataagaggtcaactttgtaaacagaaattgtttgtccttgtgtttctgagtgggtcatacatggctgtgctgaaaagacaaaaggcatttaacatataaaatgtatgtccctgcctattaataatgtgtgagtgttccactcttgggctttgtgaaacgttgggaaacactggtattagatatataatgtttctaggataaaaattgtaattgactataaattggtaactccataaaagttttcacaagtggttggaaaaatgtccaattgaggtgagtcaaatcagaatttctctgtttggggtaggttgtcctttgctcatcataaaaacaattctctttaccacttaataatctcagtgcgcctttccagcacttatgccatactttagccttgcttgaaaatttgtactgttgctaccactgatgcatctgttctagaaagtaacaggctttcgtttccaggactgtcaaatcagaagttttcccaagaacacaaagattcacactattattgcacatcatagaactcatgcctgtagcttgaaaatagaagtctttggtgtaggcatttgcttgtttgacagctctgttctaaattttgaaactagtggtactgtaaagtgcctgtctgacaatggtgtaccagaccttagtcatgcaaaataattactgttcacggttccttagctgaagtcaatagctccctgcaaaacacaacataatgcagagatctaaaggtactaaatcgaaagggagaaaaagaagaattttaaacagatttggaagaaaaaaatagattctacaagatttaccaagtgatgtcttgcagcacatggaaggctctaaactttctaaaagaaactccatgataggaatgataacttttattaatccattctggtaattgttgtcaggaagcttatgtgagttcaaaagaatgaaagcagttgtgaagatgttagcaaatagtgtatagtgtttattttcttgacttgaaatcatatcttcaagtttgcttctgcgaatttggtatttaaagccagcaatatatcacctatactaaagagattgattaaatcaacttaaagagctacagttttggaactagagtggcaggatgccctccctggacctttggtaaactccatgaatcagtgaaatggtatatcctggaaaaatcaatgttaatccaacaaataaataatttagtctccatgtcgcctgaaacatttgccagggaattctgggaagattgctgcttgactgcttgagcgaaaaggataacctccttcttaatccttggtacacaattgcatttaagactatcccccttctgggaaaaacaaggaaacaaacaataaaatcgattgtttccctggaagagacaaaaacacagaaataaattagaatttcacagactcctttatgacatatttacctacatttaccttcaacgttttcaatctaatattaaggtggaactacttgtgatagttatgtaattatcttattattcttttattgtcaacttcaatgaagtttataaaattttttttatttttaaaaaatgttacttttttttggccgggcacgatggctcatgcctgtaatcccagcactttgggaggccgatgcgggcggatcataaggtcaggagatcgagaccatcctggctaacacggtgaaaccccgtctgtactaaaaatacaaaaaaactagccgggcgtggtggtgggcgcctgtagtcccagctacttgggaggctgaggcaggagaatggcatgaacctgggaggcggaggttgcagtgagccaagatcgcgccactgcactccagcctgggtgacagagtgagactctgtcaaaaaaaaaaaaatgttacttttcaatgatacacaataaatgtccatatttttggggtatatgtgataatttaatacattcattaatttgtaaagatgaaatcagtttggatgctctttctttctttctcttgcctaattgctctggtcaggacttctagtgttatgtggaataaaagtggtgatagtgggcatccttgtcttgttccagatcttagaagaaaggattttaatttttccctgctcagtatgatactagctgtgggtttatcttatatgggctttattattttgaggtatgttccttctatacccagtttgttgaggggtttgctttgttttgctttttagagatgggggtctcactatattgcccaggctggtgcctcgaacccctgtgctcaagggttcctcataccccagcctcctgagtagttgagactataggcatgtgccaccacacgcttgtctaagggttttatatatatacatatatctgtatacatatgtgtgtgtatatatgtatacatatatacacacacatatatgtatacatatatacacatatatgtatacacatatacacacatatatgtatacatacacacacatgtatacatatacacacatatgtatacatatacacacacatgtatacatacacacatgtatacatatgcacacacatatgtatacatatatacacacatatatgtatacatatatacacatatatatgcgcatatatatgtatacatatatacacatatatataaaataagtaatgttgaattttattgaatgcttttccagtatctattgaaatgatcatgtttttttattcttggttctatcaatatgatatgtcatgtttattgatttatgtatgttgaaccattcttgcatccctgggatgaatcccacttgattgtgacaaattatctttttcagtgtgttgttgaatttagtttgctagtattttgttgaagatttttgcctctatgttcatcagtgatattggcctgtagctttcttttcttgtctccttgtctgcttttggtatcagggaaatcctggcctcatggaattagtttgaaagtgttccctcttatttatttatgtatttatttatttatttttgaagaatttgagtagaattggtccttctctaaatgttcaggtagcattcagtagtgaagccattaggccttgggtttccctttgatgggagactttttattatagcatcaatcttgttactcgttaggggtttgttgaagttttctatttcttcctggctcaatggtgataggctatgtgtgcccaggaatttatcccatttcttctagattttccaatttgttggcatgtagttgttcataatagtctctagtgattcattatatttccatagtctcagttgttgtgtctcctttttgtttctttctttttttttttttttttttccagacacagggtctcaccttgtcacccaggctggagtgcagtggcacaatcatagctcactgtagccaaaaactcctaggctcctgtgatcttccacatagcaccctccatgtagcatcatcacacctggctaatgttattattattattattattatttttgtagagatgaggtctccctatgttgcccagactgatcttgaactcttggcctcaagtgatcctcccacttcagtcttcccagtggtgggattacaggcatgcgctacttgtttctgatttcatttatttgactcttctctctgtttttcctagtctagctaaaggtttgttgattatcttttcaaaaaaccaactttttattgtattgatcttctgtgtttttttttagtctcaatttcatgcaaatttcagctctgatctttatgatttctttccttctacttatattgaggtttggtttgttttcttttctagttccttgaggtgcatcattaagttatttaaagtctttctacttttttgatatacatgtttattgctataaaccttttttcttcattctgcttttgttgtatcctatagattttgttatgttgtatttccattttctttattttaagaaattgttgtttccttctcaattacttcaatgacccattggtcatccaggaacaagttgtttaagtttcatgtgtttgtgtattttctgaggttcctcttgttattgatttctagttttattccattgtgatcagaaaagataccaggaatgatttctacttgtttgaatttgttgagacttgttttgtggtctaagaaatggtctattttagagaactcatgtgctgatgaaaagactgtattctgcagcagttgggtgaaatgttctgtaaatgtcagttagacctacttagtctagagtatagtttaactttgatgtttctttgtcgattttctgtctggaagatctgtccattaatgacagtcaggtgttgaaatccctactattattgcattgcagtctatctctccatttatatctattaatgtttgttttatatgcttaggagtgccagtgttgggtgcatagatatttataattgttttatcttgctgaattgacccctttatcaatttacagtgacctctttgtctctgtttgtttttagtttgcagtctattttatctgatataagtatagttactggggagtgattaagtcatgaaggtggagctgtcgtgaatgggattaatacctttataaaagaggttgaagggagctcccctgccccctccgtcatgtgaggaagcagcaggaaggagcaatcttacaagcaaagagcagccctggcacacaccaaatctgctggtgccttgatcttggacttcccagcctgctgaactgggagaaataaattttctgttgtttataaattacccagtctaaggtattttgttatagcagcctgagcaaactaagccatgctcctttccagctaatcactgcccccaccccattagaaacaaccactattatcattttgattattatacattagttttgtttattttttaatttaatgtaaatgaaatcatactcttttgggtctggtttcttttgcttggtgtaatgttgaaatttagttagatatttttgtgtgtatcagtagtttcttacttttttatgtgatgtagttagcatttccttgtatgaatataccgcaacttgtctttgcactcttctgctgatgaacattatggtttttccagtttttggtaagtatgaataaagctattaaaatcattcttgaacaatctttttggtggccatatgctttcatttctcttgggtgaatactgtatttagaagcagaattgttggattataaaacagttctatgtttatttcataagaaactatgagacagttttactatttgattccattttataccctcactggcaatgtatgatggtttcatttgctccacagctttgccaatgtttgattttgtttgtctttaattcttgccttttcaatttttgggaagaagcaaatcgttgtggttttgatttgcctatctgtgaagactaatgacattgaataccttttcatgtgcttcttagtcattcatatatcttcttttgtgagtgttgaaatattttgaatattttcaatttttaattttctacttttgtctcaattattgtcataggtgttcttttgcatacaagttctttgtcagatacatggtattgggaatattttctctcagtctctggctttcctatttattttcttaataatgtcttttgatgaagttcaatttatcagtttttttttgttttatagataattttttgtttcctgcctaaaacgtctttaccgaccccaaggtcatgaagataatcgaggttttcttccagaggctttatagtattagccttgaggtctgtgattcagcttgaatttttgtgtatgatgtcagttaagggtcaaagttcaatttttttaccatgtggctattcagtggttccagccccttttgttgaaagctttcctttcttcagtgaattgtcttggcaccttgttgaaaatcaattgatcaattaaatatagttctatttctggattctattctattcttttgacctatttgtctatccttatacccttactatactctcttgattagcttcaagaatttttatcattttttagttctgttcctttcatcgtggctacttttgcctcttgacaatattagcttaagagtttatttcagaagttagcacagctttcaggctgctgtgtatctcagagtgtctgtctaaaaaataggaaaaataagaactcccttatagggttattgggagaaataaacaatctagtatacatgtttaaaatgtattataactctaaaataatccttaagtgttcagaatattgcttatttttgtttcactttttgctctcttgaccttaaaacatattcttatgcaagtttactgaaatcccccagtaagtttcagattgtggcagggcacctgttctgtggatttagggaaaaacaaaggccccaatataattgaggggagtgacaggcacctgttttcttcctatttacagcaagccttaacagaaggtgatggcaattctttctgccatttttactttgtctgttttaaaaacagacaaaggtattactggacttccaatgctttgctcttccagatatttctaatttgatcccctgaacagtctgctttttttttctttattgtggtaattcctttttcagatgaatgacctttgctctcctcaccccaaatcaatgaccttttaaactgttttaatatttactagggaattacttgttctgaggcttggattgagtttctctaaaagatggtattctagaatttaaatggtggtgagaggaagggttgaaaagctgaatccattcttttacccagacgaaactaagctgaataacaactctctctctttctcaatcatttaagagcttataacaaagatgaatataaagtgtcaattattttacaacttttacctgttaccgccctagttcacaccccaactgtcattcttatttctaaatggaaactttccttccacaagcttaatggcaactttttacctttttggcctttgtgtttactagattgtaaaatcctggaggacagctctttgacgttatttatcttagttttagattttagcatcaaaccaagtacattgcattcatttaataaatgtttattcaattaaaccaactgctaatattctacccaatacagtgtcatatatatatccgtatgtatatatataatattgcctgatacacacaaacacacacacacatatatatatgtatgtaacaggcaataattgttcgtgatttagtgatagtaggaactcagtatttattcattgatcaattaatagtttgaacacattctatatttagagcattagatgagtcaagtgctactttcttttttaaaaaaatgttagaaccagctggacgcagtggctcacgcctgtaatcccaacactttgggaggctgaggcaggtggatcacgaggtcaggagatcaagaccatcctggctaacacagagaaaccccgtctctactaaaaatacaaaaaattagccaggcgtgatggcaggtgcctgtgatcccagctacttgggatgctgaggcaggataacggtgtgaacycgggaggcggagcttgcagtgagctgagatcgcgccactgcactccagcctgggctacacaggcagactccgtctcaaaaaaaaaaaaaaaaaaatgttagaaccattcaactagcattctgtagaccaaattatctaaacagtagctctcctcttcctttttctgccatgttatccataagatttggcctgtatcaccttataataaatgaagagagtcttaaattcttataataccaaactcctttggagagaattcagaatagatttatgtcatctcaaattctatcctattccagttaatgttacagacagattctagtatactttacaaagataggtgaataagtagagttttgaaaagatacagacataaaagtgaagaacagatgccttctgatgctagattttccaaaactcctactgttatgcttatatagaaatcattctcagaccttccttggattaatttctgttcctagagcaaactggtagttatttctttctttaatagaacatgaacttgtccatcacatcctagaaagttagtcctagggatatcctttaaagcctaaaggagtaaattaagagcaaaaaaaggaagtagaccttgcaacaggtggtgagtgtctgagatatagcactaggagagaaataatatagattgaaaacagaaatccttaaacatttctcrtataaacccatgaaagatagatccataaatattgtggggactatggggactaggaagcttggaagtatccctaatctagatagtgatggtaggctaaatatctacggcttccgtaaacgttcctctaaacctccctgtaaaaaacacactaagctgattgtgtaatgagctgatccagtacaattgcctccaatttcattctggaccctgaacaggaggggacatcgtgacaaagcaaattgtctggtatcatgaatttggaacaccgtaagtgatctttactgagggttacattctgtcattgtcagccttttaaggaggccttgccaccagcgcaggggaggtgaagtctaagggaaggtaatattgtcaatgcctgctaattagttctaccctggagattttaactttctrcgaagtttttaaaaacaacttccaaaactctgctgatcctgaaatgttcgagaattcagagttcctagacaatggctactgtcccccttcccactgattaggggagttggcatttcaggaaccagagtttctaagggcgccaaatagaagggctcaaagggaatcagcaggcgatggttactstgggcgggtaaatcaggtgatttagaggaggggtttggcgaggttggggtcgggctttaaacgtgggagggctaattaacaggagattaactggagargggcggtgcctgcgtccggcccgcgcggccacagtccctgcattgcgcgcgacccggcggcgggacaggcttgctgcttcctcctcctcggcctcaccgtgcgtactgggaggggagaaggggaccgcatgcaragggtggcaggcagggagggccagggtgggtggcagatggaagacttgggggggtctctgccagctggaagtgcttggctccacttagcagctaaacttagcttttcaatcgatcgcttttgaaagggaattgtatttctgtccccgtgcgggtaagttttcccatttctcaaactccaggaatgaaacgagagagtcttttcatgcttgagtgatgatttccaaacttagccttttcaagtcaaagtaacctcctgtttgaaagggtcccttgaactctggggaaggaggaaaargcacgtgtagtaatggargaaatgcctgtagtttgaacgactgctgttctccccaagagtgcaaaagcctgcgatgtctcaggtttcatgggcatagtggcctttatgcctattgtaaggcaggatttgctcttctgagttcactttgataggagaaacatcagcaagttttaaaataatactaaataatactactgctaataatgctagctatcgaaacaagaggatgtgggttagatgataatatttttgtgtgatattatagccagtgacaagagagctaagggtgagccccttgggacggttctcacctgtgccccacttccccagtctggaggaggaagccatgtggaaggagaaaaggagaagggaactctctttttcgggaattaaggtgtcatatattgctctagctggcttgggacagaggagagaggagtgcatgtaaatcttctagtctctctgcttctcttgaaatgtggcagtctgagctccacgtttakattcccctakttcttctccctaatttcttacccagtgagtgctgagtgggtgcccgcaagcattgctgtatrgcacccaggcctccagtgagcaatccttaaagcccagttttcctggggtcccagcctgctgtgagtcccagcctacacctaccttttgcatatgcttttcttggccttaggatagtactggactttgttgtcctctgctgtttccaaaataagagggctatgtgtgcgattatctttggtaatttaaaaaaaaaaaaaaaaaggcaaatcagtccaaatttggatattaccctctctggcagacgagtaaaatttttctaccgstttgttttagagtggtgtctatgaatccctgagattggaaaaggaggtcaggtcagcacagagaaaggccttaccccaccactctcccgagaggcaccagcatttcacctgcagcytctgggctctgaaccccactttgcatgagaccacatagtgggctgagtctgcagccaccacgatgccttcaggaaatgctagaattcatctagagttccagattaacgtatccgcaacatggccaccgaattatcttttttctttatctcatgtgtagtgtttgttagttttagaaggtacaaaattgcagagtcatggccctggggatgcgtgcccagattattcatgtgtttcacaatattgatgcagaaaggctggccacctcatcctgagaagagaactttgctcattttggccaaaagcctgtaaagggaaagggcgttcctcaactgagaagtgaagattcttctctgctagatagtacgggggtttggggggaggggtagaaaacaggaatgagatttgacaaggaaaggcctccagaagaccagagctgttgagaattcttagccttgatggtgggtagcccagargtaaacacttgagaaaactaagttgcagtcttggtctctccactgtgaatttgggtcatattactcactacttttctgggccttaatttccttacatactaaaggtagaaaaaaatattatttgctctacctcagggtttttcgggtcaagcgagataaaatatgcaaaagctttttgaaaattctaaaatcctcagtgcctagaacagcgccaaagtcggaagttttttatttaccaaacacacagcatttaacaggtcccagagcttctttttttttttttttttttgagacggggtctcgcactgtcacccaggctggagtgcagtggcacgatctcagctcactgcaaactccgcttcccgggttcacgccattctcctgcctcagcctcccgagtagctgggactacaggcacctgccaccacgcccagctaattttttgtatttttaatagagacggggtttcaccatgttagccaggatggtctcgatctcctgacctcgtgatctgcccgcctccggctcccaaagtgctgggattacaggcatgagccaccgcgctcggcccccgcttttctaactttattcagctaaggctcacaagaatccagtgaaatgggagttcttattcaactcctttcacaggtaaggtgaagaggtcccagagaagttaagttacacttactaagtggcagggtcgagatccacccgaatgccaatctagttccagagttttgaatacttgacactctaccccatgtcctcttatgaagaagtcacctccacattaggggacagagctctggtctctggcaagagaggttgagatacttattaccatgctggccaatgaatggagaatataatgagcaaacaaaccactgtgcaaacatgattgatcattgtaaatattttctataattcataaccaaattagtgtttttccctrcttrcttttctttgattatttctssttcattccttgaatcctcaaaccacttaacatttcatcctgttatttattattatacaggaccactcttctccctcctgacaacctttcctggtaaaaggctttcagtaattttgttgtggctgcagagccaaccatgataatggctgcagttttgtgcagcaaactcgtggcaattgattgataaatcagctttgggggaaaaaaagtttacaacagcattgccttaatccatgctataaacaactactatttcttaatgttcttaccttaactgctcattacctggctcttgggtacctgtgaaggggaagatgttaccctggagagatggttcattgactcatcaggtgtgtgtcagakgcttggtgctggccagtctcccaaacccacagacttgaggagttaagccacattcttcgtgattgagaaactctgtgtgaagtgcacagtgtgttgttcatttttaaagaaaaggcctcccattgccctttttcccagccactgacttctttgtgtactttcctaccaacagtcctgggaggctgccatttttttctctactctttcaatactgattttcaatgagggggaaaaaaaagttctctggacttttrttccatcaatacataaatttcattctgggaacattagtagaggcctatagagaatgttttagttttaaaattattgttaagtagcaactttctatttgataaacttaycttaattttaaaaaacttcamacgcttgctgtatttcttcacatctttgtacagaggcctgggacttagggatcctttcttaagctaattactttacctacactctgaaggatagtgcagtttattcatgactttcaccccttcaatactagaacaagcagacacattaaatgttaccaaaaatattatattgcaytgagagctaatctaacatactgtgctttcaagactagagacttatggaggttgattaatttgctatctaggggattttttaaaaaccttgcgcatgtagtttctgtttgcctaaatccaagctgtatatttttagcctaagaaaacaaaaataggggggccaggcatggtggctcatgcctgtaatcctagcagtttgggaggctgaggcgggtggatcacctgaggtcaggagtttaagaccagcctgacaaatatggtgaaaccccgtctttactaaaaatacaaaaattagccaggtgtggtggcgggcacctgtaatcccagctactcgggaggctgaggcaggagaatggcttgaacccaggaggcagaggttgcagtgagccaagattgcaccactgcactgcagcctgggcgacagagtgagactccatctcaaaaaaagaaaagaaaaggaaacaaaaataggggttacttaggtagctttgatttctttatctgcaaaatgggaattttaatacctcaccacataactggaaaaagaaagaagatgacagatataaggggtgcctacttgtgccagccacagagtaggcattcacttaatgtcaattgaattagaattaagcagaattaaagagttgagagcagaattaatcaagcctcttgaaagagagagtatagtgtagtaaccgtatggggtgttcgtgtcccagcttggcagcttaayaactctaattccctttttcttcttttgtgaaatgggtatagttatgacaaktgtaatagattaacaaagktkatgaaagtagtgtacataatgtacatagtatagttgaacacatagcaagctctaataaagctaagtatatatgtatgtggtttttaatcacattcaccagcaacacaaagatggctatatgaccaataawgatacatataaatgtatagattactggtaagatggatagaaagattgcagctgatagrtgtcaggctaataaggacacaatgcaggggttgagctttaaaggcaggaatgaacatcatctagaagagacagtactacatgccaagcaggataaatagcctctaagcttgggtctgagaaaagttgtgtgtgttctgtggaagagagagaagtagatagcagggctgataaaagaacaagaggaggttacaaagaataatggcagaggactggaaatktacattttaagctttaccctaagttcctacctgtyttgayttcagtatcaccagtgtgtcttggccttcctcttcagcacattyccaattatacttccaattccagacacagataactacattcctctactcaacggcttttagttgaatgtractttggaatgtgaaatgactcaaggatcatgtaaagctaattctccttccctattacacccatgaaagtaccatatatggtaattccttaccttgcatttgcaagcctgttttttgatgtttccattatcctgcttctccttctttacctgtcttcgaattgatgatgatggtgatcatgatgacaattgtgataaggatattataaatttattgagggtttttcttgggccagtccatattttatctccattacattagacaataacccattaagttagaagctattactatttcaatttttttttttggrgggggagacagagtctcactctgtcacccaggctagagtgcagtggtgccatcttggctcactgcaagctctgcctcctgggttcatgctattctcctgcttcagcctcccaagcagccgggactacaggcgcctgccaccacacccggctaattttttgtatttttagtagagacggggtttcactgtgtcagccaggatggacttgatctctcgacctcgtgatccacccgcctcggcctcccaaagtgctgggactacaggcgtgagccaccacaccaggcctactgtttcgattttaagaatgaagaaatttagtctcagagactgaatccctcaagcaaggttaacagctaaatcgtgggactggaattcaagtcctaaagcctacagttttgaatactactgaaatgacaagttgtaagttgggtctccaaagcaggatacataagaactgaggccttcctaagttcagtgctgctgctaggtacatagcttgatgtttccaaagagatcagtctatgacctctggtcttttgctttcaacctacttatagttaatctcagtgctagtatgtgatgttagtctatgtttagggcatttttgctatttatttttgcttatactgcacccttttttttcaagtagtacttgcttgatgtcttcaagctaaataatatagaactagataaaatataatattgcatacttttttttttttttttttttgagatagagtctctctctgtcgcccaggctacagtgcagtggcgcaatcttggctcattgcaacctccgcctcccggatttaagcaattctcctgcctcagtctcacgagtagctgggattgcaggcacacgccactgcgtctggctaatttttgtatttttagtagagatggggtttcaccatgttgggctggctggtctcaaactcccgatctcaagtgatccaccagcctcggcctcccaaagtgctgggattaacaggtataagccactgcgttcagcccctatttactttgacattttaaaaactaaacaatcatttcttctgcaaatagtccaagatatttttragaacagtataattaatgctgcaatataagaacatcaaatgatcttccagttattttgggtatttatgtctgctttttcccattttatttaaatctttttaagattccagaccaaaattgaaaaaatggttgacctcacccaggtaatggatgatgaagtattcatggcttttgcatcctatgcaacaattattctttcaaaaatgatgcttatgagtactgcaactgcattctatagattgacaagaaaggtaagaaatttggaggtaatattttcttacttttaasasttggaattcykgagagcagttttcttaattttctttttttatttttggtaaagcccaatagcacactgttttatgctgtaagtgaagtatgccatcgtttggcacagatggatctgatgtatttatggaacagttgctttctcctagaaactagtaaatggttttttcattatggcttttacctttttatcattctgctaagcagatgagatattctggaatatcaaagttttcacggaaactttctttcattttggaattaattttgccaatgagggtttagaaaacaatcattttctagacagttaactggtattttcagctctagtgcaggtcaagggtatgattttggttaaaaaaaaatagaaaaaaaaagaagaaagaaaaagaagaaaaaggctgagaattaaagtcttactttcaaagtgagcctcatatatgagccttttgaattttgtgtacttctgactttttaagtggatactatttctacccagcattataagaatgacttttttttttttaagtgcagatgtggggagggtggtagacagattctgaagcacatattatgtattcaagcagggtttatacgtgcttgaagcgcgtagagcgaggttccctttacaaaattaaaatattttcacgggggtagtccctgtgctcattcagcaacttcttcctggagaccatctgtttctctcttaggacctgtcctgagttttgtcctctagagccttgattttatctataggtcacagtcttccctaaggtgtttccttgttacttttttttttttttttttttgtgagatggagtctcactctgttgcccaggctggagtgcagtggcaggatctcggctcactgcaacctctgcctcctgggttcaagtgcttctcatgcctcagcgtcccaagtagctgagattataggcacgcaccaccaggcccagttgatttttgtgtttttagtagagatggggttttgccatgttggccaggctggtctcaaactcctgacctcaggtgatccacccaccttggcctcccaaagtgctgggattacaggcgtgggcctggcctactattttgaggtataatggaaggatgtttgcattttaatggagggaacacctctcatgcactgatgtgttgcagcatcagggcaacaaagtggctgtctgcttccaggtccacactgacttctagacacagaatgtcaccaaggaaatgtaccctgtcttaaaagaaaagatgaagggaattcaaatttggagagtgccgggagccacacgctttttatgtgtgcttggtcatgcagtcattttacacacttgttagcattgtcaggtgaaatgaggattcatctttccattttatatagagggggcagttagaggttaagtagctgtctgagtccctttgggctgctcttacaaaatgccatagactgggtggcttaagcaacaaacatttgtctcacagttctggagtctggtaagtctaaaatcaagatgccagcagatctggtgttcagtgagggcccagttcctgacttgcagatggccatcttctcattgtatcctcacattggcagagcacagagagagagagagagaaggaagcaaactctctcctttctcttcttataaagactttaatctcattcatgaggactccactctcttcacctaattacctcccaaaggcctcatatcccagatactatcacatcgaagattaggctttaacatacaagttttagggggccacaaacattcagtccttagcaatagcttatccaaggttacatacaaataaagagtgaaactgagattcaaactgaaattgcattaaacccaatctaatgccctttccattgtaatacatttatttctttattcaacatatatttattgtacatctagtgtgtgccaggcacttatttaggggagcactacgatgaacaagacagacaggcctgaccttaggaactttatctggaatatttattccagataaagatgttgaggaaaactgatgggcagtatcccagccctgtgcatcggttctcttcaacatctttatctctaatataatgttcatatcatattaagaaaaaatagaaaacaaatgagattaattttgcagtttgtgtttttctctgccatcaattattaaatagtggcacatgcttaaatattttttaaatgcagatttcaagtttcaagggatggggaagctatttcaaagagcataataattgcaggaaggaatacatgaatgtgtacttcttattcctaggaatgcaattcagcttctcaaatttcattatacagtattcttcaacccaaagttttatctgatttagaaaaagaaaagaggtacacatgttctgacagagtacaagacacctttcccatcccttactcttttatgcttcttgcctgttctctaaaacctttggcaggtaaacatattactttcagatgagccaatcgcttggaaatgttaatacacttgagggaaggtatgtcaacatcactgtgaaaaagataccagtgaaccatactaatagtcaatgacttagaattatgcctttccccatatttgcttccttttcactatttttattcactggtttttgttcaagttcttatttatgcttctctttttacaactttgcattgttaataaaaattcagttttaactatagatgccttctkctcctcttgtgtttgatttattgctccaaatgggccaacctggatgtctatatttcttccactaaaatgcaaataacttactaggtagaatatccccatgttatttcttggtttgtttgttttcttttttttgaggcagggtcttgctctgtcacccagactagattgtagtggtgcaatcacagctcactgcagcctcaacctcthgggctcaggtgatcctccaacctcaacctcctgagtagctaggaccacaggcatgcatgtggcccactaccatgcaaaattttttttaaaaaaatttgtagatatgggkactccctatgttgcccaggctgrtcttgaattcttgggctcaagcaatcctgcctcagcctcacaaagcgctggaattacaggtgtgagctattgctcctggccagtatttgaaataagttttttttcttggtatttggataggtttttgccaatccagaagactgtgtagcatttggcaaaggagaaaatgccaagaagtatcttcgaacagatgacagagtagaacgtgtacgcaggtaaaccagtgtctcttgaaattacttactttatgaaacaattttggtcaaggagttcagtgaagatgtctcagggtcttggagactgaggaaaaaaagtgagacctcttacctactccacatgacaattacagaaaactggatgtctgaaattgacacactgcacttgtatgtgttgccaatttggcaatactgtacttttatgtgtactttcttggggttaatgacgttgctgtatatagggatgtatcaaaagtaatggcagggaggaggtaaaatgggaacagtagattcttggagttttatcgtctttgtccataggtgagactgtcaactcatgtaaaaggttgaagaattaggtatttttgcataagattcaaaataagaatgttgacactctggaggagtaggaacctctttctctgtccctctccccactgccatctctttttaaatattatgttttaatgtactgggaattcaatgagcaatgaaaagcaataagccaagatacgactggggtatgattgttcctatcacccaggtagtgagcatagtacccgttagtttttcaacctttgtctccccttctgtactccctctaatagtccccaaaatctattgttgctatctttgtgtttatgtacccagtgtttagttcccacttataggtgagaacttgtggtatttgtttttcttttcctgtgttaattcatttagggtacttgcctacagctgcatccatgttgctgcaaaggacatgatttcattctttttttttttttgagatggagtctcactctgtcacctaggctggagtgcaatggtgtgatctcggctcactgcaaccttcttctcctgggttcaaaccattctcctgcctcagcctcctgagtagctgggactacaggcatgtgccaccacgcccagctaattttctgtattttcagtagaggctgggtttcaccatgttggccaggttggtctcgaactcctgacctcaggtgatccacccaccttggcctcccaaagtgctgggattacaggcgtgagccaccggacctggccaaaattcattcctttttttttttttttttttttttttttttacagctgtgtagtattccatggtgtatacgtaccacattgtctttatccarttcatattgatggacamctaggttgcattagcccttttttgattctctgtgaaagtctgaagcccctcccaagatttctgcagattcccttatggcatatcatctccaggttaactctggatctgggttcctgcctctatgcatgtttccatattctgcaattggttatgctggatgttaatccagccctttcatcagttcccttcaaaaatgaactaaaaaaaatgtggctaaaaatagacttgagtaagtggaagtgcagaggcgtttacactgtggcagcacaaacattttaagttgtatgttatttctctgtcagacaatggccttcagcrtcctctctttgcagaatatgccccgtacctgtacctccttcacgcaagcaatgcccagtgttacaccatttttgaggctctcctctagccccacagactcttcaaccttttcagcactaaaattaaaagtaccttcttgctcatgcaaaacaattctacccccaagctattcatcaagcaagaatgtttctcttctaagaagaagtctgtgcagatacttagcacaaaatttcaccttctatctcacttagttatatacttcttaattcagcagccctgctgagtaaatcagtgagtcttgagaatgggttgtgtcaagaatatggatataaaatagtttcaggacaaagaatcactgtggaaatttcaaacagcagaacaatatcaaaggaaaaattatgtgttagacgaaaaaaaataaaaaaaagtgagtgaagcttaagttttcaaaaccactgaagagacatgaaaacttttaaagccttgtctggtcctttatgcacttccccttttagagcaggcagccgcctgcatgatgctagtcatggccctgtatttataaaattgcccagaactggaaagtgatcagaagcaattagaccctcagtagtattagtaagactgaaatgaaaatccaagtaagtctcctgtgtgaaagcgtaacaaaagatattttatttggggattttagattcctccctactattctttccgaccttccacccttactccctgmccgtgggattgtacttttagaggaaaacgacgttatctaaattgatccgctagtcaggttgcaaatgaatgttagaaagaacaattgaccccagttctgtaaaggttccgagtcctggaggaggtgcagcgactgtgtgcacagcgccccctggtgatgagacactggcttttccgcatactaagagaagagcgtctccaacagagcggagtttccagttgtataatgctttttgagacagtacctgtttcatcgaaaaagtgcctaataacacacttttggagacacttttcagacagagcgtttccagcatcttccctttccatttttaagttaagacttttttttttcacctctctcgttacttcagtcattgtaaagctgttacgattagcatatttgaacggcagagccagaatggggctacaaatgaagtgaaaagtatgctttaccgtgtgcaacaattgtgaaagttaatacatacacatatggaacaattamctaaaaacttaaggtaatatgtgttgaaataccaagatatgtgacttaaagtcagttatttgagttctggaaagacagaaaccagtgatggttagaaagcacttgacatatttatttatttatttaataccatcttagcttgtctaggaagcattcaagaccatatacattcaacacaaaaagataaaaagaaagttgaaaggcaaacaggccagctggtgaaatacagggagtcattcaaaagacaaaataaaggcttgagttggtatttagggacaggagagacatttagaatatattccctttaaaggtagagaataacccttcactgagagtgttccatggagtctaagtgacacttgctggggactctgtcatgagactggagcataggctaggsgttgaactggatgatgtccctcgtggccccagtgtatgaacacacatatatggagagattattgtgtatgtatcactgtcatttcttctattgggatgctatcaaagagctttaaaactgggttcctgaccctcaggggtttatagtgttccccccctccccgcccccaaaagacccacatgcatataggaatgggagaatgatatgaagccatgttccattagttccatggaatatttcataaaggaagaccttgaagagtattaggatttgaaaggagaaagaggagagaagtctcatcaatttgggaaaattcctttgtgagaatgtgaacacatggctggctatgtgctgagggtgaagagctttggctgagatgagggcgtcaggaaaagcctgctgtgcagctccttttgtagttgttcwcagcctgacaatccccagaagcatgtagcaatggcagtccaggtcaggtggatgctgggatccaagtaattctgatctgagggaaggaggcgtggctgtggcctcaagagcacagagatggtgggaaggtccgtcacagagcaaatatatgccagggcatgtgtgtccaaaggagaaagaagaatgggaaaatgtaatcatggggaagaagggtaatagacccaggtagaaagtggactcttaggaagactgatgtccacctggtgatagattttggcagctgtccataaatggcactaacgtgaaggaagctgccgctccaggaagsagtctgtcgttggagaagaggggagggttaggacggaagggtgatagtgcactgcagcaggtgctcacagggaaagctggggaactgtttgcctggaacagagtctcaaaagaagtacaaaatacagcataaattggcataagtatgagggtctgtggaaaacaggccttactagcatagtgaggagtgttatctttgagaacattttgagggctgacgaaagagaaagagaactcaaaagggagaataagataaagagaaaatgaggctagaaaaacatgcaggagctagaaaggtaaaggaacccctgccccttgaccttccttccctctaccctcatggtcctcttactgtccttgactttcttctctgctttaacattccattckatttgtcaactgcgtaacacaggygtagaagtggacattgttttccagagagtctcctttttatagtttcttcctcaaccttaaaatgtctgtccttttggcaygttgtgaaggagaacactaacgtgcctaagattggaggtgacgatatctctgtgatgctgggggagaaatcacaggggcaaaacaaatactctaggtgtcattgacaaagtgggcccttctttaatagaaaatggtattcytgtcttttctttcccatctcattctcagtagtacttgtattgctccatgaaagagagggcacaggaacactcacaccatcctctctttgcttttattctgtattgaagccttttcaaatcattacttagctgggctgctgctgtcctcttcatgtctctatgtagtcatcctctttgtgagacaagcttagagataatctagggaagacaagacaaaggaaaggagaggaggagagtgacgatcgttgagcaggcaatatgtaataattatatgcttattgctatagaagagagtaacgtaaagcagaaatagttttcattttgaaatacatatcaatagctgacaaactatcaaattctccatttctagcctagattctaaagcaatttctaattctgtagacttaagggaggtgacattttaaaattaagtatttttaaaaatgttgctgggcatgatggcttgcacctataaacccagtgttttgggaggctgaggctggaggactgcttgagaccaggtgttcaagaccagcctgggcaacatagcaagaccccatctctaaaaagaaaatttaaaaaattagccaggcatggtggtgaggcctgtagtcccagctactcatgatgctgagactcaggagtttgaggctgcagtgagctatgattgtaccactgcacttcagcctgagcaacagagcaagaccccctctctaaaaacaacaatagcaatgacaacaataataataaaaatgtcaagtccatagtagatgtgttttgtattcggtcttagccagagaaacccaagatgccacggtttggagcaaaactgtggctaaaacatgctttttgttttcttctagctctgttataaagaaaacatttaggaaattctctctttctctctttcacctatcctactttttgtgtgtcctttgtagttttgcaccatcattcctaacgaatttatttggcatttggaagataggttagcaaaaattttactatatttgaaaggctagttatgtattctgttatttagatataagagcatgagagtcttgatattaaattggtaaattaattattggcaacctagtggtttggrttggcaaggattctgtcartaatcatttggtagagtagcagaagcaaaggaggtgtcttaagaaaaatcaacaccaaaagggttttcttccttcgggagaaagaatttttataaaaagaatcttgaattgctaattgttatgaacctcataagaaaaaagtatttttatttacaaaaatgaaatgagttctattagatagatgtcgttttgatattctaggaactacaaaatgccttctgtgatatttaaagatacactaaaaataaaaagaaacagaaataatgagagattctaaataaaagtcaagtgggcaaggaagcaagacaatttgagagaaaaaaaataaatcttactttgaaatttaaggatccattagtgctcagatttagtttttagaagagagagaaaaaaggatacatatctagtattttgaaattagtgtctttaayagttatctttttccacagagcccacctgaatgaccttgaaaatattattccatttcttggaattggcctcctgtattccttgagtggtcccgacccctctacagccatcctgcacttcagactatttgtcggagcacggatctaccacaccattgcatatttgacaccccttccccagccaaatagagctttgagtttttttgttggatatggagttactctttccatggcttacaggttgctgaaaagtaaattgtacctgtaaagaaaatcatacaactcarcatccagttggctttttaagaattctgtacttccaatktataatgaatactttcttagattttaggtaggaggggagcagaggaattatgaactggggtaaacccattttgaatattagcattgccaatatcctgtattcttgttttacatttggattagaaatttaacatagtaattcttaagtctttttctgatttttaaagtactttcttataaatttggatcatgttatgatttgtaacattcacacaacacctcacttttgaatctataaaagaattgcacgtatgagaaacctatatttcaatactgctgaaacagacatkaaataaagaatttaaagaatgattttgtttggttttatttttcccaacattttattttcaaaagtttcaaacctagggtaaagttgaaaaatagtacaaagaaccactctgtaccctgcttagaatcgccagttgttaacattttgcatatttgctttccttctctctttgttttctttttctctgaaacatctgagagtaagtggcagatatcatgacatgtcactctttaaaacttcagcacgtttttcctatgaataagacattctccaaataactacaataccattattacacccaagacacttagtattaatatactaatatttcatatatagagtccttattccaattttttcatgtttccccagtaatagtcttcataactactttatttttgatccaggattcaaagatcaaacattgccttctgttatcatttctatttaggtttcacttaaatgagagagttcttttgctttctttctcttttgtataaccttgacattttttgaagagtatagacaagttgttttacagaatgacccttaatctggatttgttttatctatgattttctcattcttagattcagattaaacatttttggtggtgtgtccttcacactataaaacatcaacaggcatatgatatcagtttgccctgttattggtgatattaaatttgatgaatttagtaaggtagtgtcaaccaaatctgtccattttaaagggatccttttatttttataatcatatgtggggtgataatttgagactgcatatcctgtctccccacaaactttcacttaatagatttagcacccatggtttctacatataactatgtagcacgtaaatcacaaatttagattttttttggtcttaagtggaatgtgtacttaagtctttataataaagggtaagcttttaaagtatcagttttttcttgtatatgccatccatctaatttatattagtttttgattttcatatcttttgatgcattttaattttaaatatgtatttctcaaacagtacttttaatgacatttgtgaattgttcatttagatgtgccactcaagagaaaagtcactgtgttgtattttaggtttcatagtttgagcaactctgaagtccataaacaaaacctattagacaattgactacgtagaattccatacaagtttccttttacttcttttcctaatgttaaaaagcagctttgcatgctgtggatcttggccttaggaacgctttgtggtgtaattgacagaaaagaccacgagctcaggagggaaaagtccgaaacccatgagttggctctgtgtgcatgaacaygcaygcgtgcrcrcgcacacacatacacacacacacacacaccctgctctggagttgggcaactgacttatgctgtctgatctgcagtttcctcaaactttacaagattttttgaaggtcatatgcttttctgtatgtggagcaatttgaaaaaagtatattctaagccattaagtgtttcccatgtgtgaattatctcagtaatctctcaatcataaagattcagataactgagttcctcctggttttgggtcaggtctttgttgaaccattatcacgtctttcatcgttttcttaaattttcttctcacttggtgatgcttctctgagtagaagcagaatggattgtggttattgtarcagttatccatttagctactaatatttgatattcattagtagacaattattaggggaaaaggacgtttaaattttatattctcagaggtataggaactatgtatatgagcagaacacacgtaaggaaaagtgcaaaagtctagggattacccagttcagtttctaaatttaagtataagttgtaaaaacaatttagaatagtttctaactatamttttactcccaagagaagctttagatacagggggatttattagtgaaactgcttttatgaaggaaggtggatgaaggggaaagctatttactggtctagtctctcctgaaacaaggattccccacctgactacaagacagaattggctctrgagtgaagtctgtgtgctaagtgactttaacttgtgataggactcaggtggaatggtacagcttgccttaacactattacttatgaggaataggatgggtttgttttcatgtttctgctacttaatttgaaaacaaagattgtggttatctttctatctgcatgcatatctgtgtgtacacacacmcacacacacacacacacacacacacacatacacacacacatactaccatcatcggttctaaccattatggatgcttagtaattagataacattgttactttttcaaacaccaccatctcccttcattcaggccttgttctgtcctcacctgtcctaaggcaactccatcacaagcagttcaaggtccactgaaactggaagatatttatctgtatctattatagagtcatcatctagggcaatgatgggagttttgggggcagggttcagtgactctcaaatgaaattggagaggggtagattttaccagaattactgtagcaagggcaaacgtacatttatatagatattgaatctgtattatactggacaaaagtttgtatttttatataatactacatgatgtagaatcttcttaataggtgggacatctgtaagatggaaatgaatacattgaattagaacaatttttgaaatattctgtgactctaaaaattctatttactctggaggcaggtgttggtctactcttttctccatcttgggcatgttgatggatgggggtaggtcatgagatttttatgtacactgaaagcctccgtggtttaaacaaggctgagagatccttgttgaattaatgtcaaatagacgagtctattttgaagactgaaaaaatgattctttcagggcacaggagatcttaggcccagaaaggcagattcagaagaacctacatgtaaatgagactggagtggaaatgagaatggcaggaaatgcatggaaacagacttgtaactgtctcatggcctggtcgtccaaatcccagaggttagtccattctcctgctttggtcaagctgccctggaagcctctcttaggctgctgttggttctctctgcgggatcactgctaaagatcccggagtcactccatgtcccagtgttctgcacattgctgtatgttggcttgtgtggccaaacagcatgtttggtgagtgtgggtttaaaccaaacagagttagaggaatcaaatattaaatggcttaagactaagayaatctgacacatccatcattcacttcaagatggagatgatctctcttcagtgaaacttaaaacctcagtctattggccacagcaccccacattcaattcacctttacacttggaatgactctgcaattgggactagcaaggccaagtctgatgacacaggaccctcaccactgtgggtgcttggataggtatagtcaatgcttatctttgtatattttttcctgtttcttgggctatccaatcattcttctgactgatacattctccctttcactacattaaaacacaaagaggctacttcttggatctaaccaatcaggaagtgacttggcatgtctatgctgagtttagctaggaggttaacgatcaaaaggtaattgtacaatctctgatccctagttattagggagacctctcaaaacccctaagcactgctgactgccaccttcccgatctaacattcaatgattctaaggccagaaattttgctaggcagtgaggagaagggcatggagtttcggacaaccaaagtgttaaattttaatgcagtaaggcccagtcctagggaatcctgatgggttctataaaccattcacctgagagctctactttataaataaagaaaccaaaaagaaagttttctgagttgcatagttgcatcacactgattcttcatggaggcagatggtgagaagtgaggcaatttgccttgggagtctttacaatccatttagaaacagcagcacaaaaatcctatgatcatctccccgctgccagcctgaaatgtcagccctgtgggaagctgctaggtgttcctaacatcagccaaagcggcacctctacattcatacctttcagggtgctttattcactatatattctatgtaaactgttggatttgacaaggaggagttgtcaaaggcagattactgggaagggccgtgttgggttgaatttggcaccaatctctcatacttgacagctcatgtacaagattgtggatgagctataggacctgtgagcctcctcagtcagcaagcgcaggccctaagtcacatttaattcagaaagccctgacagccctgcataaaatgtgagccgtaaaatggagagataggagctgtgtgcaagagtagaccatttaagttattgccttttactgaagtttaggaaaacatgaaccaggacaatatagactctgatataccacgaagagatctgtattagtaacttcaagaaaataatccaaataatccaaactttaagccagacataatttttaatgacccaaaactaagagrgacatcagtggagagttagaggttgcctaaagttcttagtcttttagcctaagtcattcgtatctatacctatatctttatagaagcaaaaccacccaaaataaagagaatagtgaaggactgaagcagtgtggtatagtgaatagatcctggatttgaaaaacacctatatctgtgtcttgagtctcgaggctttctggctgcctgagataatgaytgaggctttatgccccatccttaattctaaagtggcaaaattaatactttacctactgtattaatagccacaataattctgcatgataagtcatcctatgactcagtggctttgctaatggttctgtagggttgggctgatcttgactgggtttgctcatgtgtttgctgtaagttacagggtagccaggcggtcctgctgaatatgtgtctgggttctctaaggaatctggaaattggctgaaacttggctgattcagaaagatctcaactagggttacttgggcaactcaactctctcccatgtgtcttatcctgtactacagtgctcagcaaactatggactctgggccaaatacagcccatgggctgtttttataaataatgttttattggaacgcagcagtacttacttatttttatatttcctgcaactgcttttgtgtcacaatggcagagtggcgtagttgaattgttgcagtggagaccacayggctcacaaaaccaaaaatatttactctctggtgttttacagaaagttttctgattcttgctccagtaggttagcctgactgtgctatcacagcataggagcaagacaggaaatggaactgcataaatctcctttcaagagtctgcaatcattacatccaccaacatgcccttggccagagaaagtcacagggctggcctcagaactaaagtgctgggaaatggactcaaccccctcagggagatgaaccgcaaagtcacatggcacaggggcatggatgcacagagggatgaagatttaggccacttatacagtcaatctattgcacttgtccgctttgttatgctagtatgagtttcaattcagacacatgtaaaagcattttataaactttatgacattatgcaattaaaacagcatttattctaatgtgtcataattttatcagattagtggtaatctgtgatatgctcagtatgagagcaatagttacaaactaagtaaaaaacacaatacagggtttgtgaacttggccttctccctctcatttgcaatgtgctgccttaggaagacagatgggacaaggaacaaatatttggacagccttatcgcctctataactaagttggttcccaaactgtgcccagtctgttctcttgaaattataatatgcaccctgctcccaaccaagtgtttcatcaaatttaatcagtttctgattattcacatattaaatgtagaccagagaatattgctggcccaaatgtaaaatttttgtgttagtgtttgctgaaataattgtatattatcttctatgggttgtatattaatcatgaaaataaagctgtgctaagttcttgtttgagctacccaatttataacttgatagtgaaaggaatataatttcctttgtaactcatctttcatgacaatacagttagagkctggatcctagaattgattctaataatagttttgccactgatacacatgagaaacccaggcaagtcacctacttatgctctattcatttcttcacatttaaaatgaatacattgaactagaacaatttttgaaatattctgtgactctaaaaattctatttactctggaggcaggtgttggtctactctttctccagtgataaaatatgaatatcaagatgtggaaataattatagcagaaagcttatagcctttattaatgaggtcaagctcaatttgagttaaatagcattttgtgggtttaatgtctcagaataataatctttaattttctctgaatcrccaatgtgatgtcaccaaaatgaaatgattgttacttttccgaaaaattcaataaatgcattgaattacctccatttaataattttcttctattaattcttcttcagacattgaacatactatcacttgaatagaccagtaacttgtgctagtagttgatggtgggacaaatagaatgcttggaagtaaatgaaacagggttccttggtctaatcattattctgggttcccagaatcttgactctatraattagttaggttctacctagtccaaatgtgtacagataaaataaaagaaaaatgtttattcatttcttcataaagaaatatttattgaaggactcatatgtgcccagcactattctagatgcttggtatacaacaaggaccacagaaaaagtttgcattccaaaggaaattctttaacttagggcttgtaaagaaagaaagatggtgaaacgactgaactcatattataccagaagtcagtcaactatggtctgtgggccaaatctgacctgccacctctttttgtatggcccacaagctaacaatgatcaatggtttttactaatgaacatttgcaatcaatttgatgactagaaacactaaccttgaactccaattaagcaaaatgttaatcccctgaataaaaattccattcttctcattagtagatctttgttacaaaaaaaggtacttcatcattattgttatcttttgaagatcatcagctaaaaaatatggaaatttgttttccttcctgttttataagtacctatgtaacatacttgattttgcctcttagctcacaaagtctaaaatatttactctggcataaaaacagacacatagatcaatgggacagaatagagaacccagaaataaatccatgaatttagtcaactcatttttaacaaaggtaccaagaacatgcattagggaaagaacagtctcttcaataaatgctactgggaaaattggatctccacgtgcagaaaaaggaaactagacctctatctcttgccatatacaaaaatcaaaccaaaatggattaaaagcttaaatctaagacctgagactatgaaattataagaagaaaacattaaggaaacactccaggattttggtctggcaaagatttcttgactaaagcctcaaaaacacaggcgaccaaagcagaaatggacaaatggtatcacatcaagttaaaaagcttctccacagccgaggaaacaatcagcaaagagacaacctacaaaatgggagagaaaatatttgcaaatatccatatgataagagattaataacaagaacatataagaagctcaaataactcaatagccaaaagtcaagtaatccacttaaaaatgggtaaaagatctgaatagacgttctcaaaagaatacatacaaatggccaactagtatatgaaaaaacacacaacagcactaatcatcaggaaaatacaaatcaaaaccacaatgtggtatcatctcactccagttaaaatggcttttacccaagacagagaataacagattctagtgagaatgtggcaagaggggagccctcttacactgttggtggggatgtaaattagtgcagccacttgtggaaaacagtatgaagatttctcaaagaattaaaaatagaattaccatatgattcagcaatctcactgctgggtgtatattcgaaagaacggaaatcagtatattaaagagatatctgtactctcacgtgtattacagcactattaccaatagccaagatcagcctaagtgcccatcaacaggtggatggataaagaagatgggatgtgtgtgtgtataatataatattccattatatattatatgttacatatattatgtattagattatatattacatattatgtagtatattatatattacatattttatatattttatattgtatattttatattatatattacatattacatattatatattacatattatataatatagtatatattatatactatattatcatatactatacatactatgtgttacataatggaatattatacaaaacaaaatattatttggccataaaaaaaattctgtcatttgaaacaacatggatagaactggaggcttttatgttagtgaaataatccaagcacagaaagacaaatatctcatgttctcactcatatgtgggagcttaaaaagataacctcacggagatagggagtaaaatggtggttactagagaggttgggaaggatagtagggatgtgggggataaagaggggttgaggaatgagtttgagaatatggttggatggaaggaatcgatctagtgtttggcagcacaataaggtgactatagttaataataatttattgtatatttcaaaataactagaagaatgcaattggagtgttcctaacacaaagaaatgataaatacttgaggtgatgaataccccaattaacttgattagattataatatgattgtatcaagatattatatgtatcccgtgtgataactgttatgtatccgtatccataagaataaaaataaataaaaatttttaaraagaaaaataaaataaagtatttactctggccttttacaaagtttgtcaactcctgatctatacaattgaataaaaagcatataaatggatactgaaatttctctcattatttttcactgactaactggtgccagaatttaatcaaagtgactaagaacaccactttatttcaacattggtcctcttatatttgccccaaattatccatttttgtttcaaattattacaattattacattctatatggcttggtatatatgggatactcagtaatttttcaagaattttctcagttgttaaaggattgaaatattgttaattgtcttctatgaaaacatagcttcttatcagcatgttttgagcttgtatgtgctttccctagtagctgaatttttttccatgagatcagttctcttgacattactgtgatggaaattgaggttttaaagtccctttggttggaaaagtgtatttttgtttggagtagatatgcagaaatcatgatacatccagtgtaacaccattaaatcactcacttctcagaaacggtagctaaaaccattaatgtttaatcacttcatagccaatgccaagtagtttacattaacagggagcagaatatgctatggccaaatgaaactaaatggaaaactcagaaacagctgatgatgtctaacatctttgttttttcctgggacatttatgctcacggtggtgattttatattgcacacatataatatagtcatggttattgcttttaaaattgctcctagtttctttgatggatttaaatttattgctgttttatggagagatagcatattattccaccaggagcatcacagtgtctcattgctctgccacacaaacaaaatttaaacccacccaaatccaaaaatcaccccaaatccctttatccagaataaaaacaatagccattatgtttaggatactgattagcattttaaactatattttaaaatatgaagaagaaaaatgtcatagattactatttttaggaacctaccccaaagttacactagataaatgtatgaaagtacttgaaaaccaggttatttattgaagcaccatttttaatagcaagcgaatgcaaataattcaaatattcactaacagagactggttaaataaactatgaagattaacacaatagattattatgcagctgtaaaaagaattagaaaaatctctatatgttactatggttactgtggaataaactttaggatatatatatactcttgtatgtgtgtgagtgtgtatttgtgcttatgttttatttaatttagtattggtttgttttagagacaagtctcactctgttgcccatgctgaagtgcagtgggacaatcacagctcactgtaagctcaaactcctgggctcaagcgatcctccctctgccgcctcttgagtagcttagacaacaggcatgcaccaccatgcctggataatttttaaattttttgtagagatagggtcttgctatgttacccagtctggtctcaaaatcttggcttcaagtgttcctcctgccttggcctcccaaagtgccgggattgaaggagtgagccactgcaccctgactgttcttatgttttaaaatcaatgaaaagacagamcataaagtttggaaaaaatagttaactatagagggaaggaggcaatagaataaaatgaaaagagatagaaactatttttaaaagtatcttgttttaaagatgtgactttgaaaacataaatattttacataatgattaaattaattaaacacaaagagcagttcctaaacattgaaagtaaaaagaaacaaagaaacctcaatgcgtatcctattgatggcataaccttccacaaaggaactatccgaagtggtcttaaaatgtaacaatttgattaaacataaatggtaggacaacagaatatgaaaacaatcttttcagtaatagtattattattggtagtagtgttgatactattctgagactgcaatctgcatagtgtggcatgaaacaaatgagtaattatatcagcatcactgaaaactaggatttggggcatggcagaaagaagatacacatacaaaatcaaatacgtagaaactctgtactactgaatttgaattagaagtattagttttaactgatgatgtgttttatctaaaacaaaacaaagataattatttttatctacgtctactgaaaggaattagcaagcagatgcaggcaatgtgagatgaacctggaatatgacttaccatattagaaaataatgatgctattcaatacaactagcattgtgtcaaaaggactctagactaaatgaatacgctcccatgccaataaatttcaagatgtgaaagatgtttaaatctatgagctcataagatatatacacacacaacacccacacacctatatgtacacacacagattttatacatatatataaatgtattttatgtgttcacgtgtgtgtatatagtctttgaaggatattaaaaatcttattttttttaattgtttagaatcaaacaaaccctgagcatttatcttgcctcttctatataaagtttaactcggcataaccaattgctgatgaagaagaaatgtttccttgtagaagcaaaccagtgaataattgaagaaaaaatttatcttttcaacatctaatgagttaatggattcaagcaaagattatccacggctgttaacaacacaaaaagacaatcggaaattagytattactgcgggaagtacccaataccatctatgaaactgtgtggacaaaaacactgacaaaaatctccacgaatctctaattttgaatacaaatttaaagaaaatgcaaaggattaaaatagaccatgatgaagtcagaaaaattcagacagagaaaaatgctccaggaccagaaacccatttcttccgcaaaagcttccaggtagagattgactgaccgagagaacagagacatagagagaacctagagattaaaagaaacttgagcgatttgtcagcattcagttgcaacgtatggatgtgatttgaattctaatttaaaaaccaaagtagaaagtggtaaacaattggggaaatgtgaacaatgatagaatatttaatattaatgaaatatgttaaatattttcagatatgataatggcattgagtatgtaaaaaagagcctgtttttaaagaaatacctctgaaatacagatgatataatatcatctgtatattagatgatattatatatatcagtatcatcagaataaagtaaggttagcatgaattgttaattgttgacactgtgcaataggtacgtggataattactatactgttctcattccttttatttatgtttgaaatgttctaaaattaaaagttaaagcatagagtgtaaagttgagcaaattcctccaagacctaaatatagcttatcaaaacttacattaattagatgctgactgttgagctaatacttttttttaatgatgtgtgcttcagtttattgcacttttcaaatactccagttttttgtgtgcgtgtgttttttaaattttattattattaaagttttagggtacatgtgcacaacgtgcaggtttgttacatatgtatacatgtgccatgttggtgtgctgcacccattaactcgtcattgagcactaggtatatctcctagtgctatccctcccccctccccccaccccgcaacggtccccagtgtgtgatgttccccttcctgtgtccatgtgttctccttgttcaattcccacctatgagtgagaacatatggtgtttcgtttttggtccttgcgatagtttgctgagaatgatggtttccagtttcatccatgtccctacaaaggacatgaactcatcattttttatggctgcatagtattccacggtgtatatgtgccacattttcttaatccagtctatcgttgttggacatttaggttggttccaagtctttgctttgtgaatagtgctgctatatacatacgtgtgcatgtgtctttatagcagcatgatttataatcctttgggtatatacccagtaatgggatggctgggtcaaatggcatttctagttctagatccctgaggaatcaccacaccaacttccacagtggttgaactagtttacagtcccactaacagtgtaaaagtgttcctatttctccacatcctctccagcacctgttgtttcctgactttctaatgatcgccattctaactggtgtgagatggtatctcattgtggttttgatttgcatttctctgatggccagtgatgatgagcattttttcatgtgttttttggctgcataaatgtcttcttttgagaagtgtctgttcatatcctttgcccactttttgatggggttgtttgtttttttcttgtaaatttgtttgagttcattgtagattctggatattagccctttgtcagatgagtaggttgcaaaaattttctgccattctgtaggttgcctgttcactctgatggtattttcttttgctgtgcagaagctctttcgtttaattagatcccatttgtcaattttggcttttgttgccattgctttttgtgttttagacatgaagtccttgcccatgcctatgtcctgaatggtattgcctaggttttcttccagggtttttatggttttaggtctaacatgtaagtctttaatccatcttgaattaatttttgtataaggtgtaaggaagggatccagtttcagctttctacatatggctagccagttttcccagcaccatttattaaatagggaatcctttcccaatttcttgtttttgtcaggtttgtcaaagatcagatagttgtagatatgtggcattatttctgagggctctgttctgttccattggtctatgtttctgttttggtacsagtaccatgctgttttggttactgtagccttgtagtatagtttgaagtcaggtagcatgatgcctccagctttgttcttttggcttaggattgacttggcgatgcgggctcttttttggttccatatgaactttcaagtagttttttccaattctgtgaagaaagtcattggtagcttgatggggatggcattgaatctataaattaccttgggcagtatggccattttcacgatattgattcttcctacccatgagcatggaatgttcttccatttgtttgtctcctcttttatttcattgagcagtggtttgtagttctccttgaagaggtccttcacatcccttgtaagttggattcctaggtgttttattctctttgaagcaattgtgaatgggagttcactcatgatttggctctctgtttgtctgttattcgtgtataagaatgcttgtgatttttgcacattgattttgtatcctgagactttgctgaagttgcttatcagcttaaggaaattttgggctgagacaatggggttttctagatatacaatcatgtcatctgcaaacagggacaatttgacttcctcttttcctaattgaataccctttatttccttttcctgcctgattgtcctggccagaacttccaacactatgttgaataggagtggtgagagaagtcatccttgtcttgtgccagttttcaaagggaatgcttccagtttttgtccattcagtatgatattcgctgtgggtttgtcatagatagctcttattattttgagatacatcccatcaatacctaatttactgagagtttttagcatgaagagttgtcgaattttgtcaaaggccttttctacatctattgagaaaatcatgtggtttttgtctttggttctgtttatatgctggattacatttattgatttgcatatattgaaccagccttgcatcccagggatgaagcccacttgatcatggtggataagtttttgatgtgctgctggattctgtttgccagtattttattgaggatttttgcatcaatgttcaccaaggatactggtctaaaattctcttttttggttgtgtctctgcctggctttggtatcaggatgatgctggcctcataaaatgagttagggaggattccctcttttgctattgattggaatagtttcagaaggaatggtaccagctcctctttgtatctctggtagaattcggctgtggatccatctggtcctggactgtttttggctggtaagctattgattattgcctcaatttcagagcctgttattggtctgttcagagattcaacttcttcctggtttagtcttgggaggatgtatgtgtcgaggaatttatccatttcttctagattgtctagtttatttgcatagaggtgtttgtagtattctctgatggtagtttgtatttctgtgggatcggtggtgatatcccctttatcattttttattgcatctatttgattcttttttcttctttattagtcttgctagcggtctatcaattttgttgatcttttcaaaaaaccagctcctggattcattaatttttgaagggttttttgtgtctctatttccttcagttctgctctgatcttagttacttcttgccttctgctagcttttgaatgtgtttgctcttgcttttctagttcttttaattgtgatgttagggtgtcaattttaggtctttcctgctttctcttgtgggcatttagtgctataaatttccctctacacactgctttgaatgtgtgccagagattctggtatgttgtgtgtttgttctcattggtttcaaagaacatctttatttctgccttcatttcattatttacccagtagtcattcaggagcaggttgttcagtttccatgtggttgagcggttttgagtgagtttttttaatcctgagttctagtttgattgcactgtggtctgagagacagtttgttataatttctgttcttttacatttgctgaggggtgctttacttccaactatgtggtcgattttggagtaggtgtggtatggtgctgaaaagaatgtatattctgttgatttggggtggagagttctgtagatgtctattaggtctgcttggtgcagagctgagttcaattcctgggtatccttgttaactttctgtcttgttgatctgtctaatgttgacagtagggtgttaaagtctcccattattattgtgtgggagtctaagtctctttgtaggtcactgacgacttgctttatgaatctgggtgctcctgtattgggtgcatatatatttaggatagttagctcttcttgttgaattgatccctttaccattatgtagtggccttctttgtctcttttgatctttgttggtttaaagtctgttttatctgagactaggattgcaatccctgccwtttttcttttccattcgcttggtagctcttcctccatccctttattttgagcctatgtgtgtctctgcatgtgagatgcacctgaatacagcacactgatgtgtcttgactctttatccaatttgccggtctgtgtcttttaattggagcatttagcccatttacatttaaagttaatattgttatgtgtgaattttttcctgtcattatgatgttagctggttattttgctcgttagttgatgcagtttcttcctagcattgacagtctttacaatttggcatgtttttgcagtggctggtaccggttcttcctttccatatttagtgcttccttcaggagctctttcagggcaggcctggtggtgacaaaatctctcagcatttgcttgtctgtaaagtattttatttctctttcacttatgaagcttagtttggctggatatgaaattctgggttgaaaattcttttctttaagaatgttgaatattggtccccactctcttctggcttgtagagtttctgccgagagatcagctrttagtstgatgggcttccctttgtgggtaacccgacctttctctctggctgctcttaacattttttccttcatttcaactttggtgaatctcacaattatgtgtcttggggttgctctcgaggagtatctttgtggcattctctgtatttcctgaatttgaatgttggcctgccttgctagattggggaagttctcctggataatatcctgcagagtgttttccaccttggttccattctccccatcactttcaggtacaccaatcagatgtagatttggtcttttcacatagtcccatatttcttggaggctttgttcatttctttttattcttttttctctaaacttctcttctcrcttcgtttcattcrtttcatcttccatcactgataccctttcttccagttgatcgcatcagctactgaggcttctgcattcttcacatagctctcgtgccttggttttcagctccatcaggtcctttaagtacttctctgcattggttattctagttatccattcatctaatttttttttcaaagcttttaacttctttgccattggttcgaatttcctcctgtagctcggagtagtttgatcatctgaagccttcttctctcaactcatcaaagtcattctctgtcccgctttgttccgttgctggtgaggagctgcattccttttgaggaggagaggcgctctgatttttagagtttctagtttttctgctctgtttttttcccatctttgtggttttatctacctttggtctttgatgatggtgacatacagatgggtttttggtatggatgtcctttctgtttgttagttttccttctaacagacaggaccctcagctgcaggtctgttggagtttgctggaggtccactccagaccctgtttgcctgggtatcagcagcagtggctgtagaacagtgtgtattggtgaaccgcaaatgctgctgcctgatcgttcctctggaggttttgtctcagaggagtacccggccgtgtgaggtgtcagtccgcccctaytgggggggtgcctcccagttaggctattcrgggatcagggacccacttgaggaggcagtctgcccgttctcagatctcaagctgtgtgctgggagaaccactactctcttcaaagctgtcagacagggacttttaagtctgcagaggttactgcggtctttttgtttgtctgtgccctgcccgcagaagtggagcctacagaggcaggcaggcctccttgagctgtggtgggctccacccagttccagcttcccagccgctttgtttacctaatcaaacaactaactcagcaatggtgggcgcccctcccccagcctcgctgctgccttgcagtttgatctcggactgctgtgctagcaatgagcgagactccstgggcatgggaccctccgagccaggtgcgagatataatctcctggtgtgccttgttttaagcccattggaaaagcacagtattagagtgggagagacctgattttccaggtgccgtctctcacccctttctttgactaggaaagggaattccctgaccccttgcacttcctgggtgaggcgatgcctcgccttgctttggctcgtgcacggtgcactgcacccactgacctgcgcctactgtctggcactccccagcgagatgaacctggtacctcagttggaaatgcagaaatcacccgttttctgcctcactcacgctgggagctgtagaccggagctgttcctattcggccatcttggcttctctctgagctaatacttttaaaatattttgcactccacagaggaaggttttatatgtaagtctgagttttgtttttctgagttgttttcagttggtccatgtgattacatttttatacatggtaaaaatttatatatttttttccaagtctttttctttttcttttcttttcttttttctttttatttttgagacggagttttgttcttgttgtccaggatggagtgcaatggcatgatctcagctcaccgcaacctctgcctcccggattcaagtgattctcctgcctcagcctcttgagtagctgggattacaggtatgtgccactacgcctggttaattttgtatttttagtagagatggggtttctcaatgctggtcaggctggtctcaaacttctgacctcaggtgatccatccgccttggcctcccaaagtgctgggattacaggcgtgagccaccatacccggacctgagtttctttcttaaagtttgtgttaagatgttgccatgtggggacaatatcataatataacatactattctgtgtgtgtctgcacatgtataatacagatattattttaaaatatgattacaaatggcataatctctttctgaaaccatacaggtttttgttgcattttttttcattaacactatgccctgagactttattaccaaagggaagaggagaggaggcattttctattcaagaagcccacaaataggaattaacacaggtgcaacagggggaattcttcattgaaaagggacaaaaagtagaaattcctctggtacaaaaagagggggttcagagagaatggatcttgggttgggatactgctggggtcccctgagggaacttacccatctctggcctttgtgagaagataggcaccctattgaaggatatgccccatgtaattgatttaaatgtgccctcctgccccccaaaatgtatccaacttctaatccttggaacctataaatgtgaccttttgtggaaaaaagggtttgggcagacataattaagttaaggttatctcgatgagattattctggattagattgggctctaaatccaatggcaaataattagaagagaaggggaaacagatgcagagacacagagagaagtccacgtgaggacagatgcagagagtggggttacacagccccaagccaaggaatgccaagggttgcaagcaaccagaaggtaggagagaggcaaggaacagacgccctggagaatccagacagaaccaaccctgccaacaacttgatttcaggtttctgacctcctgaactgggagataataaatttatgttttaagccgctaagtttgtggtaatttggtatgaattgctctagaaaaccaatatatctcacttattataccaaactctgggaagaatcccaatcacggggcacctaagtgcaataggagatgcccaaaagcatagtaatattggtcaggtagtttgcaggggtgagttccagagagaaaacccctaagtatctcttgacgtacttttgtacgcagcttcctggagttctgacatgctccttgtgggatgcagaaggcagctgatggctgcgaagcagtaggcctatcacagggatccctgtagtgagggataactctagctggggttacagcagagactataggtggagttgtagagtaacggtagaggccaaagaaggaacaggagttaggtgggaaaggggaaatagtatcaggtgctagatatgctgagaaaacagcccatggatttcacccaccgtggacttgctagaatggatttagataggacagatcagaagaaactatttgcaactcagagaagcagaagccagggaagaaatataatttggaactaaagatcgcctccccagtataaagttcttattgtgcccaaattttattttggagaggaggagaatcttgaaaagagaaattttaataagaaatagtttgaactgcaatatgaattctgctgcaatggaccattgtaatcagtgtgaatggggcaagtctaaaatttcttttgtcattaggtggagggaggttggaagtgaaggaagaactctgaggttacatcaatcacatgatttctttaaaactacatttgtgtgcatgaattgtatataatatttgatcttattacacatagaaatggcaaaaatcagtggttatatgctttcaatatttttctcaagtaaaatccactataatttttaccggctaaatttatactcattttattaacaatttatttgcacatctgcctgggaaaaagtctgtttcaaacaatgataatctgatgcaactgtatctcttttagtttcagacctaccctcaaaacccaggagaagcccgtctcttttcaaagggctttctttttttttttttttcctcaatctgggtggctaactttgatttgtctttggcacgatactgtggagctcacaagtaactctcattaagagttctgcaaatgctaattgatagatcagcaagtttggagggctgcttttaacacatacagtttcttttggagttttgcgtcttttctacctcttaagagtcaagtctatttgacagccaactagagagtattgaagtaattgcccataaaatgagagtctcctatctaccctcttctcagcacacttgcctaaagaatctgcctactgccttcactctttgcttcatttggtctttcagtggctcgttaggtgtgggctccttttggccagggctacccagctctatttcagttccctgtatgcctgtttgccttcggaggcagtgacaaatttgctaggttgcgaggtttgcactggtcaataaaccagtccaaagtatccaagcagtttgtggtttggaaattcttgagctcttttggagaagatcggtgatttcccattgccactagatgtccctgtgtgacttttcttttggacatcagtgctgtacacgcggcaagttatttctactctgctggatagaaggaaagtgctccgcaggctctgaagaagcagtttatagcggcatgtcacccaagctaggactcggcacaacttagccctagcacatggatttagagtgcaagggtatggcaatgccgaaaattactcagactgtgcagaaatcaggattatctctatagaggtcctgggatctttccaacttgcatcattaaacttttcctgcctcccagcctactctcaatactgagaccgaagcttctaaaacaatctgtcatgaagaattacgagctagcttttaaaaaatagtttttacttctgatcttttgcaggccaatgcctgatgttactgtatatgaccagtatgccgctcactgtgtgagtttgcgaacacccaaactgtgtacagtaggccccctttgtctcagttttcctttctgcaatttcagttacctatggtcacttgcagttcaaaaatattaaatggaaatttccagaaataagcaactcgtaagttttaaattgtgtgccactctaagtagagtgatgaaatctacttccaactccatccggcctgggatgtgaattatctttttatcaagcgtctctgcacaatatacactgtccaccccgtcagtcacttagcagccagcttggtgatcagatcgattgtagtggcattgcagtgtttgtgttcatgtattttacttaataatggccccaaagtccaagagtagtaatgctggcatattataattgttctattttattattagttactagttattgctgttaaatcttttactgtgcctaatttgtaaattaaactttacaaactttataatctttattttattgtgcctaatttataaattaaactttatcatagtgcatgacatacatgtataaatgggaaaaaaaacagcacagtcatgcattgcataatgacattttggtcaatgatggagcatatatatggctgtggacccataagataataatacagctggaaaatttctatcacctagtgatgtcatagctgtcctaacattatagtgcaaagcattactcccctctttatgttgatgctggtgcaaaccaacctactgggttgcaagtcatagaaaagcgaacaagtaatgtcctaggccttcgcattcactgcccactcactcrctgactcacccacagtgacttccaatcctgcaagctccattcatgataaatgccctatacaggtataccattttttttttttttgagatggagtcttgctctgttgcccaggctggagtgcagtggggctatctcggctcactgcaagctccgcctcccacgttcacgccattctcctgcctcagcctcccgagtagctgggactacaggcgcccgccaccacgcctggctaattttttgtatttttagtagagacgggttttcaccgtgttgaccaggatggtctcgatctcctgacctcatgatctgcccgccttggcctcctgaagtgctggattacaggcgtgagctgccgcaccctgctgttttctactgtatttcaccgtaccttttctatgtttagatacacaaatacttaccattgcactataatttgtctacagtattcagtacagtaacatgctacatagatttgtagcctaagagcaatagtctacaccatatagcctaggtatgtggtaggccataccatctaggtttgtggaagtacacaccatgatgttttcacaaagataaaatcacctgccaatccatccctcagaatgtatctctgttgttaagcaatacatgactgtatatagacatattaagttggtgcaaaagtaattgcggtttttgccataaaagtgatgacaaaaactgcaattacttttgcaccaaccatgttactgtactgaatactgtaggcaattgtaacacaatggtaagtatttgtgtacctaaacatagaaaaggtacagtgaaatacagtagaaaacattaaaaatggtatacttgtatagggcatttatcacaaatggagcttgcaggattggaagttgctgtgggtgtcagtgagtgagtggggagtgaacgtggaggcctaggatattacttgtttgcttttctatgacttgcaacccagtgggttggtttacaccagcatcgtcacggagctgaaggtggctcacactagctggcaggggccagttgttaccagtaggatttgatactattgacagtttcaggcatcaactggactcttgaaatatacacttgcagataactggtgtctaccgtattccctgtttattaaaaccagttaattaactatatgcttggttgtcacagcaatatcagctggctataagtgtccttttaatgcttactctcaatttctgtatttattttgtgacacactggaaacacttagtggaacccttcgagcgacactggcctaggcattatcacaggctgagttctacatccttaaattaaaactaatggacctcgaggaactggagaggcttaaggcagctttaggagacttgagtggagactcttgtaatgtggcaggagctgtactctgtccttccagaactcctgctctaggccaggcctggaccttccactgagcaactacactgaatctcagatgaaggccactttaaaacagaaaaccatggatgatcccaggaagcaacagcaatagagaaggaatgcttcttgaagttcagcttctgaaccttcttggggaaattaagttaatcttgtaaagtgccactttgcgtatctgaagacaaatacaggtggcatagggatggtaaataccttgcactgggattcgttttaataattagccatagtgacacctaggtgatagataatgtgatggcttacccagcaaccagctccaattacagaaataacagaaggaaattttagcttcacaaactgaaaagaaatagtttgtttactcgatgcatcaacagtttgtatctcaacagtcatttattgagccagttatttgtaatgcaagagcacaacttgcctaaaaataatgttgagaatagtggttaagtgtcctgttttgcttatagaagaccatttaaaccagactgtagttgaactaaaataagtaaggtctctttttgtcttttttgtgattccatgggtcgggtcaaattgacggcacggaacattgcttactcctgaaattccaaactcttgaaatttcaatttaaaatattgggttttccctgcccttcttaggatagccagtagaaaaatggggtttccctggatttcctt

SEQ ID NO: 95259 - DNA, 102145 bp, Homo sapiens
tttttggctattatgaataatgctgctatgaacattcatgtacagtttttgtgtggatgtatattttcatttttcttcggtgtatacctaagggtggaattgctgaatcatgtagtaactctagttttacctttgtgaggaaccgccaaacgttttttcaaagtgactacaccattttacacatagctaggagtgaaattgttgagtcatacagtaactttatgttttgcattttgagaaaccaccaaactgtttcccaaagtgactgtaccattttataataccaccagcaatgtgtgagtgttccacattttctgcttctttaccaacatttgttattgtctgtcttttttattttagccatcctagtcggtcagaagtcatactgtgttttttgatttgcatttccctaatgactattgatgtagagcaccttttcctgtttgcactggccatatcttctttggagaaatgtctattaatttttttttgcccagccagagcatgatagcaagaccctgcctttacaacagcaacaaaaaattagctgggtgtgatggcctgtgcttgtagtcccagatgcttgggacgctgaggcaggaggatcacttgagcccaggaggttgaggctgccaagaactatgattgtgccactgcactccactgtgggtaacaaagccagctgtctcaaataaattttgtttcccaattaaaaattggtctgtttttttaattgctgagttgtaggaattttttattctggatactgtttcctatgagatatatgatttataaatatttcctcccacattgtgggttgtcttttcacttttctgagggtgtcctctgaagcacagaagtttttaattttgatgaaatcttatttttttctttaggtacttatgtttttggtgtcctatctaagaaacaatggcctaatccaaagtcaaaaacatttactcctatcctttcttctaagaattttaattttagttcttacatgtgtgtttgtgattcattttgagttaatttttgtgtgcaatgtgaaatagaagtccatcttcattattttgcatgtggatatccaaagttgtcccgggacagtttgttcaaaagatcattctttccccattgaattgtcttggcacgtttgttgaaaatcaattccctctacatgtaagggtttatttctggacactcaattctatttcatttacctatatatctgtccttagtaccacactgtcttgattattgtaactttgttataagttttgatttgtctaactgcttctcacactttgaaccactctttttcagtctcatctaccttcaattccagaggtatttgagcctttagggtattctgtcatgtaaagtgcgttgcttctaagtcttcttcattgatagcttaaggttcagctttcccatgactgcaaagcctttgatcagttttttcttctttcaagctgctaattttttgttgccattgttttccaacttatgcgactcttgtgtaccttgaaaaggaattttttatcttgttttaatagggtttccagggtgagcaaaagtagttaaatctttaatattctaaatatatattataaataaattacttttaatatctttttttccctcatttccacatccaagcagggacactatctagtggattttatcccttcacatctctggttctttcattacatctcagtaacattagctactattattgtcattagttcatttgccttatttaaacttgcttctcctattagctgattagagctgacccttacagaaaatgtaagccarataatattttcagaattagatcaattaataattaygtctcttcaagactccagaaacaattaaacttcagtcaatattagttcatcccgacttgttttgaaattttttttctatatagacaagcagtgccagcaccagattttgtttagattttcagtcaaacaagcacatttggtcaagagtttttcattcttcaggagattggtaacattttcctgtggcctggtgaattttatgactttctaaggtttgaatagtaagaatattgattaatctatgcatgtcaagttgctggatttgatctagttgacattgatatttgacagtatgtttagtcattaaaagctcaaatgtcatagtactcttaacctctgctttctcctcaccacataacgcacagatctcgtatatttaagtagcactttttatatgaaagggtcatgtcaaagattaaatttccatgatttccagtagagagaaaaaccacaagagtattaaaatgaatggctgatatatgggaatctagtttccttttatttctcatttagtaaggaagattccaggattagtatctgagctatatgtaatctacatgtggctaaattgaacccttacctttcctttgcaatacattttcctccatataactctgcatagaggcatcacaggattaagaagaagcccttttatgaaagccattacacatatatacactcacacatttgcatgcacaaaattagaatatgtcaagtcagaaaaagcttattaacataaaatggagttggtcaatgagtaaaaaaaatatgctgatgggagggataagatctagtgttcgggagcacaataatttattttcttttgtattttaaaataactggaagagtggaattggaatgtttctaacacaaaaagaaatgataaatgcttgaggcaatggatatcttgattaccttatttgatcattacacattgtacgcttgtgtcaaaatatcacatgtgccttataaatgtgtacaactattagttatccataaaaattaaaaattaaaaaatccgtaaaatggtttaagcattcagcagtgctgatctttcttaaattatttttctaattttggaaagaaagcacaaaatctttgaattcacaattgcttaaagactgaggttaacttgccagtggcaggcttgagagatgagagaactaacgtcagaggatagatggtttcttgtacaaataacacccccttatgtattgttctccaccacccccgcccaaaaagctactcgacctatgaaacaaatcacactatgagcacagataaccccaggcttcaggtctgtaatctgactgtggccatcggcaaccagaaatgagtttctttctaatcagtcttgcatcagtctccagtcattcatataaaggagcccggggatgggaggattcgcattgctcttcagcaccagggttctggacagcgccccaagcaggcagctgatcgcacgccccttcctctcaatctccgccagcgctgctactgcccctctagtaccccctgctgcagagaaagaatattacaccgggatccatgcagccagcaatgatgatgttttccagtaaatactgggcacggagagggttttccctggattcagcagtgcccgaagagcatcagctacttggcagctcaacagtgagtactacgtacctggcactatggagaattattttttagggtgtgaccatcttctcctcaccatatgaatcccttttgtagtgtaagcacgcacacctcaaatttctccttctttataatctgtctaccctgctttcctcctgtctgcctccagtcttcctcttctctccataagtaaagcgagtgtgccaatcactgcgtgctcaactttttttccgcaaagtttgtaagtagagagttaagaagttcctgaacattaagaatgagagattgtatgaatcaatgtcttaaatctacagccaaaaaaaaaaaaaaaaaaaatggagtgtgaagaattttgaaaagccgtttattatgaggaggaggagtagggagaacaaattaaataaatttccacggttttcagaagatcattgtgtctcctacacccccttcagtttacaaagcctggtctttaaacatagaactattattttctcttcttagttatgggtgcaggttattggaataaaagaaagattggattcctttcaaaagtttttctgtgtttcacattgctcaatttttttcagtttacttgatggaataatgaaagcaatacaccacttgctatagtatttaagggagttttatgtttataatatctacaggataaaaaagcagtatttgcaggattttagatcctgctttcaggtagtagtcatgggatttaataaaaaccacgaaataaaaatgtatccaggtcctagtcattaaaaatattaaatggtattttattactgtactatcagagtttatcaaccaaatccaattcagtctgtatcatagaatcatctgttttaatttcgtagctccaaatatgtgccagagggctgcgttggactgacatattattactgataaaaatgttgaaaagtaaacatggcaacttctgtagaattatttaaatcaatttgcaaaaatgaggccaaaatgtaaatagattttttaacatttaaatatcatgaatatttggatgagatattacaatgaagagttttgaagtcataattaactgctagaaggaaaacaaagtaagctcagggtaatggttaatrtatgacccttttatataaaaaatgctacttctgtatgcaagatctgtgtgttgtgtggtgaggaggaggcagatgttaagaacactgagacatttgagcttttaatgactaaacatactgtcaaatgtcaatgtctgcataaacttcttccctccctcaagtcataaataataaaatctccatctctattatatataaatctagtgagtaaggcaatactgatgtgtgaaaataaagccagtagagaaatcagaagaagacaatggcagataactattcactgggtcccaaagcaaacctacatttctcagtttcatgaggatgtagtagattggtacgattgtattaaatcaccatttgccaggagttacttctatgtctgcccaatgctgtatttgcatataaagaatataaaacagaccacataattttgcattgtctgtcaaatgaaagtttccagcttgttgtttttgttttgtttcctcccattctattcctaaataaagtttccagctttttattctgcatttctggcaatgtgacctgagttactggaatctgtcatttttttctttagccagcaggattaatagacattacttcatcaggcaatataaaatcttaagtggctaatgaagtgttaatctttttcagtttctcagatttttactgtttgcccctaataattagctggccaggtttcttccttcctgcctttctccttttttccttttatttgtcactgaattttaatagtcacttctcaaatattatcttctgacacagatggccttagagttagttatacatgtgtctgtgctgaacttttgcaggcagattcacattgacaatgtggatctaactgaagaaagtaatactacccattaatttctgggcatgtgctgacatattttggaatgaaatcgatattttgtttttaaaatttaattgaaactaaaattattttcaaaaatatgtttgatcttatttttaatatggttagtaattaatatagtttccataggattcaacgaggctaagagatcaaattttgtgctgtaaaataatcctagaaaggcaggaatttttcatatatgatattkcaggcgttacgacagtcaggtttttgttgctattaaagtgaagcaaatctgatccccttttaatttcaaccactagatgatgtcttagaccattggaaaatagtgtctcagaataaattagaccaatatttatgactgaaagttatgagtgacacggcaacttcaccttaagtttgtatgattggtggagcttccagcttatgaatgacatgtatgggaaaaatctaattacggaggattctggaaccctaactaatattttgttttattatgcttcgacattcctgaagstaaataaacctaactctggcaaaaatgacgacaaaggcaacaagggaagcagcaaacgtgaagctgctaccgaaagtggcaagacagcagttgttttctccttgaagaatgaagttggtggattggtaaaagcactgaggctctttcaggtgaatgtgaaatatcattacataattttaaaagtgaccgtgtgcctgggtacaaacctgttatctgctatgaaacattactgaatcaatttctggataatgtggtgaaagattcaaaggaaccaaacttcgtgaggctttaaaaggggagttgtctgtcaagcaatgaaataagcagaattgcytaagctgtggcttattaatgcagagttagctggttaggaactctgaagactattgccaggttaggaggtcagtacttcaaaaacgtgagcttcacacctgaaaatgaaaacacaagagccaaacagggtatcttaagtagcaagagcctgcaacttaatttgatttgttcaaatttgaatttacacatgtcctaggagcatgtttattatgaaaaactgagatacatgaatataggcacacggtattcccctaagtctcattgtttatgtgtcttaatgtatctttttgtgaagatgagtcactctccttatattatatattgttggggtagctcttcccttatcttatagaaatgttcatagcatcttctcaggcccaaatctgtagtttgaaccctcaagaaagatcctggttagggatgaggctggaaaagcccagaaaagctgttgtgttcttgccagcatgtacctaatggtttctgtacccatcagcaaacaccctcccttacaaatgcattttgtttgggggcagtggcggttgatgagagctgttaagataaggaacctagctctgcgtgatgccttgggctgctagtgcagtggaaagatagctgcaattgcagttagggggttcagacctgtgttatcctggcttggctaaacactagctgctacttaggttcaatttctttatttgtaaaattgcattaataattcctacctaacaggattgctgggacgacataatatgagtgaaagtgctttgtaaagtgtacaactatgaggcattattatgatgcctctatgatgatcrtagcaggggaattagaagcctgatttggcaaataatttctttttctcttttgacctcgaagaaaggatcaggcaccataaacagtggtaatggaaatctgaggaaatattttacagacaattatgtcatccaaggctgtgtccatacagtgccaacggcaggccaattcaattagacagctgggtgcagtggataaattcctggagaaggagttagcagccctgagttttcactctgccatcagctagtcacggggycttagctaagccatttaacccatctggacctcagttcccctaaaaacatctactctgcttcaaccaaaggtcattaaaagcccaacgtgacacaatgtatgtgaagtctattgggccttgaacttaatcttaatattattatcagccaactgaaaaaacatgcatgatattattgtaaaggttaataaaaacagaaataggacatttagtttcctcatcacaagaccagtttctttatataggagagggtgctgtttgatttgatactatgctggcactggaaactatctatcctgttcctatgctgaaaattctgagatcatctaggattgcatcaggaattgtgttggtaatcacagtgtatcatctggagtgagaagatgtctgcttatttgtaggtgggttgggatggagagaacagagtcttcaattaacttagaggaaatgaagaacacatcactgggggaaattctaacctgatttttaaatattaaatcactgcccttatctctgagatccatcatagagtgatagttgcagcaacacatccttggctgaagctagtttgaagattgccaaaagagagcaattattaaatgatcccatttaggggttattatcattatttttttacctttttttcaccctccttgcaatcatctaagttgtttgttttccttttgccttcaaagatcctgtcttgactacttatcttgctcctaattctttttgtaccatatgggttacagtttggctagtgtttcccaagcctcagtcatttccatgccacctccccaatttctgcttgccttttgtactgtctacttataaaaaaattataaaagcttatttctgaaaggttattttaaaactttattttaaaagaaaactttatattaggggtttgagttttagttatgtttttcagaaacacataaatctggatattacatgataatataataaataattttttccccaaataatcacgtgccacctgtgggatgtgtaccactctgtgggaaatgatgatgttcattttacagggccactttatattttaaatgccccttctatttttttatgaggcaggacaacctatacacagaagtataaatatatagattttttattaatggaaataatggttggaaacatttccaagttttattcaaagaacaaagagattgtctcttcctcttgtgtgggtacttggcaccttgcttaagatgtgaamaagaaaagctcatggcaytccttttattgtccctgaaggtgattttcagatgctcgtgtttccacaggaaaaacgtgtcaacatggttcatattgaatccaggaaatctcggcgaagaagttctgaggttgaaatctttgtggactgtgagtgtgggaaaacagaattcaatgagctcattcagttgctgaaatttcaaaccactattgtgacgctgaatcctccagagaacatttggacagaggaagaaggcaagggtggtcttagcttgtcgggtaactttgcaatctgacaaatattgcaaaggggaaaacacaatctgtgaactaatatttttgaacctgcactgttttcaacagagctagaggatgtgccctggttccctcggaagatctctgagttagacaaatgctctcacagagttctcatgtatggttctgagcttgatgctgaccacccagtaagtgtccagtaaaatctatttctcacatgctctttcagctccacccatgtgccaggcactgtgccatgttctgtgctgcaatgctttattatagaacaatttattatttattccccataactgagagcagacttccaaatgataaagcttccctgtacacgtgttgactggaagcgggttagaaggatggtattttcacatagcatttatttttaaaagggttggatagaggaggagacgctaaaccttggagaatatttctgtggaattagacagcctgaaatatacctgcagatggtgatccttggaaaaacgatgaactgaaattgatcatgcctctgggaaactagggaggactaggtattatggggctcagtgagagaataaaattcttcctgctattttccttgactggaggtagttaggagtagagtaatgtagttgacttcagtctcaatggaaaggtagagagttttagaataaaggctatgatggaagacatatctcttcccacatctaccctgaatctatctaccatcattctttcctctactccaataaaaatgaccatctgtaaagaaatatgatacttgggtaagcatttcccattattctccccttcccccttttacatctgtttttatttaacacaagagacctggaacttctttatggccagagtgaagtacagttaatagtctgggagaagtaagcaatgcacccattcattataggcattttttccctcccccagtgccccttgtctaaaaatgggcagataaaagagtgaaacccaagcagatcactaacgcttacagggtgcctctgtggtctgcaggtagtagtttacagacattccttgctgtttaaactgaggaaatctgggggtttggcagtgtggctatactctgcgcagtggctctctaagtgcgaccccaacatcagcagtgtcagtatcacctgggaatttgttttaacaagcccgcccttaagtttgagaacccctgttttaaaggaaactatgacaactttaaccctagggaaatcttcaattaaaccagtcatttgacataatataccaactcagaccaattcaaatataccattcaaacaaatggtcaaacagacctaattcaattgcattattttcaaaaagctgaattctctcaaagaaacaatgtgttatatttgctaacatagcctaaaatttcagaatattttccagtaattcacatgtaaggcttctgaacattagaaaaacattaaaaaatagctttagtaatcacccattgttatctttcccctctctcaacttccagaaggcatcagaattagcacgggaacctgacgtaggagctaagcagtacccgggctgcacagacaccagctgttaacttgcagaatgaccttggccaagtccctttacctctgcacctcaagttctttatgtaaaaagtggaaataaaattgttactgacctcaaaggggtgtttgaaaagcctagttaataaaacaactggaaagcatttggcaagagtaaatgcttaattccagaaatagaaatgctgtattaaatcatccggatcaatgcctggacactaaakgattttttgataacctcctatttccaaatgctccccttagtctagtttgaaaattactcaacctggagaaaggagttcagccattttaatggaacaaccataggaaccactgaccttgctgagaaaaaatttattccaatacccagcataaattttcctgtgcttaattttattccattactcctaattatacccaccttatgataccttctcttattttctgtgcagccacttgaaataattgcaagcacttagcaatcccctctcttgtcattttttaaaccgcatatatttcttttatacgcacaccaaatgttcattatacagaatgtgatattggcaaattggtgtttttgtaagttgtttgatgaggatggaaaagttgtctaagcactttttctgcctgggaataatcccagtcctgagacaaacacagggaccgttgtgataggatacttcagaaggggcttggaatataagagtaaggttgccgaggctccctagaaagggttaaatatctaggtcagtgcctctcaaacctcagggggcaaactaatcaccttcgagatcatttttaaatgcagataatgagtctgtagggcctgggattctatttctggtgatctcccagataaggcttgcaccagagggtcttgggaccacactttgaggagccagcatctagactgggaaggtctttcgaagtgggggttcaaggttcactcataaggtgtttgttaaaaatacaatatcttgatgctcatctgaagcctactgagtcagaactttcagggatggcccaggaatctgcatttcaaggtatctgcaggggatcctgatgagatctaaagtttgagaactaatgtcttaattaatgttccagctcagcgattctcatccctagctttccattcacatcacatgtggagaattaaaaaatactgatgccagggcctctgggaatgtggccaggtttgatgtattatttaaagctcccaggtgattctaatattccatcactgttgacctatttggggtagctaattgagtgtcaacacaaatttagctgagcactttagagttcaggctgggtcttcaatttcctttgatttcaattgagagagggagggtgggtactctctggctgctagggttgccagatttagcaaataaatatctaggatgcccagttaaatttgagtttcagataaataaggagtagttttgtggtataagtatgycccatgcaatacttggaacatatttatactaaaaagattatttgttgtttatctgaaattcaaatttaactgagtgccctgtgttttatccggtaaccctatccctggcttcagttcagaatggatggccaaggaatgctgtttctctgtcactactagtgcagctagcgtccctagtttactttgccagtccatggttcaatccaggaagttctggatcgcccacaacatttgcgtaatcaccgccacactaagctaatgaggcatgatgagtaaatcgctctcttgcgtccttggaaaaggtgcaggtgtttgcagaagagaggcagttgagattcttcaggaggcccagcagattatgatgccgttaccatggtgtccagtctggcaggaaccggggaacagatgctgtgcttttcacaggacgcttttccttttgtcatggcctgttttctttttgaataataaaggtgcttggaattctttggttttaccatctcaagtagcctggttttactagtgagtgttgaaacaagtactttctagcatgactgcatctaccctctccagcaggagacctttttaaagggcacagatctatttgtgaatgtggtaactatttattttattttwttattattattattattttttaccaaatacccaaacttcaaggactgtggtaagtattttgtaaaattttttatatagacattttaggacttcacaagcctgcctatgaaccccagtttaaaaactcccaattcacagtaaaagaaagtgctagtttcttggacagaggatacttcatttctacatggtgttaaggtggtctcagggcatcttctctctcctccccttagtaactctcttgtcattcctgaaagaaaggttgttgacaatggaagttcttcatttctgtcaagcagacagccctgtgaagatttctagcctcgaggccagttctctccagccaggcaagagaggggcgatttgctaatgagtttgaggctcctcttgagcggcccatcttgcagagctgtcttaggttcagcagaggtagtctaggcctttgtgggcctcaccctgttcttcactctccagtgccatgatcccagtggcttgtctccttgcctggactccattcttagcaagccattgcttcctggttatccttccaggttgcagggctgtagtggtaggagtcaaattgcaataactccttctgagcttccaacagctagaagaaacaaccctggaaagaattgattgtctgaaagtgcttaaaggaaaggaaaatggaaagtctgttgacaagaggagagatttttgggtaaaccaagaagtcctctctgaaggatttcacttgactgaaaaatgacagacataatgtttaatttcccaagtggctgatgatggataaaaatcttgaagttggctaagactaactagaattataagaagtcagagtgaaatggtgccaggcttctgtcctgtgcatgaattccctaaaatcgattttgcattatgtggctgtagtcataaaatacagcaaaacctctttaattcatactaatttgggaatgtgtctattattctaaatgatagaatttataataaatgtcacatttattagttatttatacaaagcaattaaaattaggttaagttactgaataatcatgttaaagggatctgttttaatgaataggataggattaatttgtgattaagatcaattacatgcaaatgatatttgaaaacctaaaggtattgttcacaatatcaatttgctcaactaagccattctgcttacttagtggaaaggtaaactttagcctgaattgccacacatcctaaattagtatagccccaatttaatgaggttttactgtaagcacaatttgtttctgtctgtgtcatcaagawggccatcctaggataagatttacatatgaattgaacactcagayaccacagtgattttcttttaggtcttctgcagctaattttcagcactttgttaaataacttaatcttttttgtgtttaagggatttaaggacaatgtctatcgacagagaagaaagtattttgtggatgtggccatgggttataaatagtaagtacctgtataactctttcttgtcactggctagttaggaaaaacacatgctgtgttaaacaaacctgtcatctcttcactttaacttttgcagaaagcaggtgtgaaccattttaaacactcaccaactctgtaggctttaaatgccaacactratgtttgacatctgggtataattgtaaaataatgagacctgtgagccacatgccaagtgctacgtttacaccattgtttccagctccaccaagacaaagaccatttctgtgcactctgcaggccttagaaactgtgttttaattttaattttactttagccttgacttttcagtaacccccttcagtctcctgcttccccgatgaaagtagaggattcagcaagaacggtgaaagggctcagttaaggagccgtaatagagaagacatgtgtttgttttacatggagaggaaaacttcctgtaaactgcaggggttatgaaggagtttcacacccattcccagatcagagttgggatggaagaggaggacctaacttcggggtgaggactgtgcatagtacatgatgctaagtggcagtgactttcactcgcatccgtgtgaagagaccaccaaacaggctttgtgtgagcaataaagctgttgatttcacctgggtgcaggtgggctgagtccgaaaagagagtcagcgaagggagataagggtggggccattttataggatttgggtcaataaaggaaaattacagtcaaaggggggttgttctctggtgggcagagtgggggttacaaggtgctcagtaggcttagcttgggctcagaggcctgacagtgacaggatgtgtttgtgactggaaatggtgttgtatgttgactgcaggccatgtttagaaaaatgcagtggtggttaggcctgtgtttgttctactcatgctagtataactcatagatcatcacaatgctctctttcctctgtctggtatgattgatcaagctacaggaaacttgtcatcagaacaaaatgcaaatccatctcgtaagggaaagattcgtcctaccccaattgagagtaggtgtgaaacttgactgtcctgtgaggcgaatttttcactggtgaaagtttagaacattacgtgtgttatagagggtctcagtgtgggctttgtttataaaaagggatttgacmcatggtgcttaagacagatgagaagattcttcatcccacctctcactgggcatccctagcttcctttgatgcttaggtgctcttcccttcatcctcccaagtcccaggcatccttcgtcctttctccacgacatttaggaaaacaatgttcttaaaaaccaggaccacatggcacatgtcctttcacatgtgcctattctcatctcctctgttctaagcagcttctttcccctctctactgtgactttccacaccttgcaatgtcagcatgcacttgccctagcccaagcccaacctcaggcccccttcttaccctcagtaccacccccgctagccccatgtcccagtgtttcctgattaaattgccaagagaggactcggatgggctgagctcacattttcacctcaggccctgatgatggttgtgagccttatgattggcttcccctggtccacaggctccttctgcggaatcaggtcatgactgtaaaggtggatccttagagggggtgtgggcagggcagttctttgtagcatgaccagccagaacatggtagaagctcaatgcctggcagagccttttcccttagataaagtagatagcttcgtcactcagtctgcctcctgagtagctgggactacaggtgtgtgccaccatgcccagctaatttttaaaatttactttttgtatttttgacagggttttgctttgttgctctgactgttctcaaactcctgggctcaagtgatcctcctgccttggcctcccaaactattgggattataggtgtttgccattgtgcttggccagaaaatgtattttatatgtagatgctatatgttttatgtatgtgtgtgtgtgcatgtgtgtgtgtgtgtgtgtgtgtataaaatgacatgatttcggccgggtacagtggctcatgcctgtaatctcagcactttgggaggctgaggcaggcagatcacctgaggtcaggagttcaagaccagcctgaccaacatggagaaaccctgtctctactgaatatacaaaattaaccaggcatggtggtgcatgcctgtaatcccagctacttgggaggctgaggcaggagaatcgcttgaacctgggaggcagaggttgcagtgagccaagactaagggactagctcaagggttacttatttcttcttgatagaattcaaaagctaaacaaaggcaagctgatgttgtggtgatacaagtagaatatatgagtcaaccagtttcatggaactttggtaatgaggagtcatttggttttaaagaaaacatatttatatggagaggacagaaaatgagcatatagtcaaaatgatggagagtgaggttctcaaagtgttaacaagagtttgcgtttgccacctttgcatagctaaagagtaagatgaaggtgtgatgtctgtagagaaaaaaaagtagagattggagaaactggtggacatttacacaaaagagggctggatggagctggggcattccaggatctggtcccagtttggagggctgggaagtgctaaggttcaaggggcctggctgttggtaactgaatgttcaggaagccaagagagccaggaaatrrccaattcatcattttatagtgagaaacaaccctcataggactcacaaaatgatccttatagtcatgatagcagaggaggccagattataaccttaggctacttggtggatgcagagtcaagtcaaagcaaagggtatttacctaagagagcttagaatccagggaattatagccctctcccctggatggtgctgagcccagactgacctaggcaggataacagcatgcttaaaaactgcagcattggactccaatagtctgggcttgtgtgcactcctctcctccaagccagatgtgcaacctcattgtgccaaggctgcttcatctgggaagtgtgcccaacaataagacccatttcacagggttgtattaagaactaaaacagagaatgcatgtgctgtacctcacacatcgcccaacacatgaccaatgattataaatgtcacttatattattaggtttaatacatctccccagaccatttccacaggctgtcttccatttccagtggacctactgttttcttctttagtgatgttaataccgttgtttatatgccatttacaaataatgtagctcaaaacattcttggaagaaactgtttagtttcccattgaagggctgttgcatatacagaagtattttgtgttgacccacattcctctttacagagagatttcataaaaagcagtcatattcctccccacccccttttccctgcttttttttttttgcacatgggaagctgccaaaatacagactgccagtacttcttgtgagtggatgaactgaggaaggtgcctaccaaaggtagttaaatcaggaaagcacgaacccaggacttgtgggaagtagagccaaggatcattccttaatgccccgcatgctgtcattgctaaagtttctctgagtatgagtttgaggatggataagagagagacagtcctgtgtgtcacttttgggctcttgtgcctgccatggtgctggtgggggtggggcacagatactaacgaattccaaatgggccttgtccattttctccaggctgccatgtagcaagtaaggtttcccttcagtttataggaaacagagacgcaatttctaattgaaataggtatttttctagtgctgatggttttctgagtacataaaggagagtgacgtgaataccataattacttaaaataatctcatttaagtgtgcaacaacctgattttccaaactgatgtttagaaccactttgtccaagggatagatcatttgagattggggtagttttgaaaaatctggcgtatgcagtcctcgcaaatatagtttggtgataaaattagggaccatgctggcaggcggagaacaattcaattccctgttgataattagttaagactttctggacaagaagaagaagtcaaacatgtggtcagaaatacagagaaagatggagtatggatattttggggttgtaataggggttagcaggatatagtttgagttgtctaaaggtaaggagaaggcaaagaaatgaaatacagaataatatatattgaaaccacaaccaagaagccctctgggggattcgtgttgaatactatattttctgtgatattcttgaaaggataaatcaggggggaagaataaacacaagcagagaaaaatgaaaaaattccactctatgatgaaaaaacagcaggctcaaagtctgtattaccatgaacccgaaagaggagagggggcgggaaagcgccggcatgctaactgtcgatagatgccactcaggcgagcttctgattgacagtgctgctgagaaacatgattgattacccagaggcccacagcagcctgcagacatgagtgtgggaaggcctaattgcctcaccaataatagcgcaggaaacactcattagtgcaaatatcattcttcatagaagatctgagaatgaacgccctgtatcgagaggacactttctaaaatcatctgtgagagaatgtctaacacgcagatcatgcctctcctcccccgcccaaataaaataaattctagtataaacaggaaaaaagtaccccatgattagataatgtgatgtgcatatagacttgcagttcasaggaaatggaagtgtgtggggggcasatagcctgtggaggaagaggaaattatgactgcgatgtagtagttgttaggtttgtctgaaactgtccagttttctctctttagtgccttcatatttgaatctcagcattaacattgctgcatttctgtggacttcacaattactatattgttgggggaacaatcagtgatacgttttttcaattgactagaaataaacacatttttcttttgggggctgttacaatgattattcctcaacaatatgcatgcatatttaatttttttttcgtggggatggtggtagttatttcaatccatcttattctcttggaaagaggccctgagctcctactttaattatkccactcttgtttgcttaaatwgattttgaatattattgtgattgtgttttattatgaatgtacctactcctggktgaaagtaaggtagcccatgaacctcatgttcttctcatggggctgcttcctctttgatttatttatwtttatccatggaatctgaaatgtraataggcaactacaactgtcaataggtaaggtaaacaagagagtttcaacatgttagaatttccaactctaatttaggttagagttggacaattccttaatttgccaagaaaactcatttgatttaaaattcaccgattcaaatcatcccttaacattgctcagcctcagtttttctcctctgtaaaatggagacaaaactatctcttcggcctctcctgggaggtttttttaaggattaagtgaagtaagtggggcattgctatacaatgtactttgttatccttattaaaacaagaatcaaacaatctagaccaaaggcatggggtttactcagacccctgacaacataaaggccttggctgcttttcctgtttttctttagatctgagaggcagcgtgtgaagctgttaagtgtcaaaagtcrgagctgcactgcctggggtgaatcccagctttaccatttactaactgagtgacctgggcaaattgtttaaatcttctgtayctcagtttccttatctgtaaaatgaggataactctagtactactttataggattgttatgtggattacatgagcgaatatagtaacaaaacttagaacactacatgtgctatataaatatttaataatattgttattttctcacttcagatgatctcttctttttgtctgtcctcatgctccaaatcattttattaccctttggttgccagtcttctccactcccctcggccaaggcttttgtataatcctgacttctgtctgatttttacactatattagttattgatacataaaaaataatcctcaaatttagcaccttaaaacaacaaacatttattatctcacatagtttctgagtatcaagaattagggaacagcctagctggagggttctagattagggtctctcataaagcaaactgttgaccagggaaaccatcatccaaaggcttgactagggccagagggcctgcttccaatatggttactcatagggctgtttgcaggaggcgtcagtgtttagcaacgtggcctctctaccaggcagcctgaatatcttcaagatactgtagctggcttctcccaaatcatgtgatccaagagagtgagcaaggcagaatctataatgccttttataacctagcattggaagtgacacaccatcactcttgctgtatccattagattcatagaccaactgtgacacactgtgggaagggattacacatgggcatgaatatcaggagtcagggttcactgaggaccatctgggaggttgggtaccacattcatttaacttgttccctccctccctctccttccctctctccctccctccctcccttcctcccttcctccctttcttccttccttccttccctccttccctccttccctccttctttccctccctccctccttccctccttccctccttctttccctccttccctccttccctccttccttccttctttccctccttccttccctctttccctccttccctctttctctccttccttcctttttttgaaacagggtctcactctgttgcctgagctggagtgcagtggtatgattttagctcactgcaaccttgacctatcgggctcaggtgatcctcctgcctcagcctcccgagtagctgggaccacaggtgcatgccatcatgcctggctaatttttgtatcttttgtagagatggggtttccccgtgttgcccaggctggtctcagactcttgggctcaagcaatctgtctgccttggcctcccaaagtgctaggattacaggtgtgagccactgtggctggccccatttcatttctttatgacactttttaactgctctcccacagtgggagctaatgtgctatctgtacaactaatccctatgaaagaagaggtagcatggtrtagcagaagatgtggcagaatgtataggatttggagctagacagaattaggtttgaattcccgctctaccacttaaaagctctgtggtcatgggcagtgacctagtctctctaattctcaagctgtcatcttaaaatgggcacaacaccttgcatgattgggaggattagcaatgattacaggactcagagtgctgactggcacaaggagatattaaatctatgatagatatgattattagtgtcatgtggtaaatagctaattgttcttcaatttcatataatcaattgttaggctcatttaaaatgagtaaaggattttttttttttttttttttttttgtgagacaggatctcgctctggtcacccaggctggagtgcagtgtcatgctcatgggtcactgcagcctccacctcccaggctcaagtgatcctcccacctcagcctcttgagttgctgggactacaggtgtgtgccaccatatctggctaatttttcatattttgtagagacacaggtctcactatgttgcccaggctagtcttgaactctggcctcaaacaatcctcctgcctcggcctcccaaagtgatgggattataattgtaagccactgcaccagactctaaaggatcttaaggagtaattgaattaaggaatttcaggctccataatgggctgggttaaaggaacttttaaaaaataggggtgtgtgggtgtgtgtgtgaggggacctcccagcttcacataaatcatgcacatagtttgcttctttaatctggaaaattgccccctcaaaggccttcccaggtcaatgtgtctcagccagaataaggttggaggataagctcgcaacagggctatgttggactcatccctgaatggctcattttggtaaaaatgttcattatgttgacytctcagctaacactttcagattgtattaggttccttttcttagatcctgcactgtgttaaacgtgtcacttgattttctgtcatttaaccacacaacgagcccttgaggtaggtgccattattgtatgcactttgaagatgaggaaactgatcttcggagacattaagaaacttactaaaggttacacagctgattgtgccacttgcatgaaacaccaggtatagatgcttaaaattcctctgaaatggagcagtaaattgaagagcagaactgaagcaaatatttatagtactagggtcatttcctggatggccagaatagtttctgagtaaggtcacttttagaggttccaagaatgcctctggtagaatctaaatgtctgctcaaaagtccacacccttttcttttttgttttctgaagtggcttcagcaacttccacttgacataggtggtttcatacacaagttgggaataacagtgacagaactaagtgacttggcatttgtaaaagttattctccttacagaattctcagcatatttgaaatgcaccatccttgtaagtatttaatacacttagaattttatggactcagaactcaaaccagtcctrtgacactgcaaacctgtttctcgcaggttgttggggacatctgccagggtctggcatggcagaaccatgtctccattctgtgtggtgatttttccctctctcccaggccccatgctattctcctcctacccaaagcctgaccctcgtgagatacagaatgaatggaaataaacacagctgggctgaggcttgaaaatcaattgccagggatgtgtcactcyggtttttactagttgctagcttatctatttcttgatttttttatttataaaattgcaccctttgtgattcatttgctctgagtgtaagtacacagctaaacagagaccctaaaacaaaacagctccaacagaggactagcatatctgaaaaatgcaatcaccagctcagcaggcacattcaatttgggtgagcttgtgaatattctactcagctctatcagagagacagagaattttctccttttacatggagtggtgttgattytaaccttctattctcatcgaagcagagaagggcattttttttttttttttaccctcctcttcctgcttatactgccaagtactacatgatgtcaaaacaaaaccctctgggactgagattcagtactgtgcagtgcattttaagatatttgagtagatacataaatatggaatggatgtgccttggaatgaacatattggatttccaagccagcatctcacttcttaggaggtcttctcagtttcctctttcactagatgactcagccataggtctgcaaagaaaaagaaagagacagatgatcagagactaataagggtagactgcagacttggagtagagctgttttgctgccctgcttctcgcgtcctagtgctcagtactgtgcgcactagggcttctccacttgcaggtagctgtgacagtttagctttgtgtctgagctaggggtttactgatgctgagtttttcctaagaggcatttgcaattattgcaacttgcagaaaaataactggggtggctctacctctccacctttccagaaatttcagttgaccttagcatttctcatttcatgagagaagaggcatgatttatggatcctgcttggtttcagaatgtagcttaaaggaatacattactaaaggagttgtgagtgccacattacctatttttagataggcgaatcttaattggaagcataacaagtagaaggtagaggaagaatggaagggaaggttatgctttcttaacagggaaaaaaacttaattggggggggcgttgcaagtttttctttttaatgatgttttcctcatcaatttcattggcaggtggtcaccttgatgaattgtaggctctactgtgatgtgaaaccaagctttaatttttttcctttcgctgcccttttgagaagaggcaccttagaaggcaaatatgttttctccctgactgagctaattttatcccattccattatcttccattgatttgctttctcaggttttgaatgaaactgagatatatgtggctgtttgggtactttgtgactcctgcataaacactagttgttgatgctttaatttctctgaaatgaagcggtaaattgaaaagtagaacaaaaccaaatatttgtagtactggggtcatttcccagatgaataggatagtttctgaggaaggtcatattagggatttttagagtgcttctcctgtagaattcaaatatctttctctgcccaagatgccacgtcttttcttttttaaaaaatctgcttagcaacttccatttgacataggtggtatcacacacaggttgaaaacaagaccaatagaattaagtgacttgggtttttataaagttatccttctctttacagaagtcttagtgtatttgaaatgcacagttcttataagtatttaaaatacttcaggctttatgggagaatcattttcatgccaagtgtttctctctacctgaagcgcagctcagtggctgaaaggaagggagcctgagagttgcaaagaaagacaaaagggaaaattgatttggaaaaggtttctcctttttgctttttgggcttggtgggttttttagatgtgtgtgaatgcctcagtaggatgttgtctgattatagcatggctcccacagctgtggaaaacattaacgcagtatggtcctgtatcacttactgacaaggacaacagttgcaccaaattctaatgtatttcacagggaaagaggtatgagtatttttactttaaaatgattttcatgaacatgaaggattcgaattacttccacaagtcctgcttgagaggtgaatggatttatatggaacagtgctgttttgtcatctccagacctgtttccaaccctgcagggaagtgatgaaattttattcatttttatacacctggaggaagagaatcaactatattgagtacctattaggcactaggcactggccaggatgttttacagatgacctctcatttgatcctcacgatgtgagaagtcttatttccctcagtttcgaatgaggaaacggaggccaaaccttgatgctaggtacatattgggtactcagtaccttgtactgatgtgtattggtcaagagtggggtctctagagctagccttcctatagctgagtccccactattgtacttactagctgtttgatcttggacagattattacatttgtaagcctcagtttcttcaacagttaagtgaggacatgaatagtcatttagtcactctgtgggataagcattatatgacataatccatgtaatgaactattatagtattgttattgtcacagtgaaatgggtgggtgaataaatgaatgctgttattaatytgcacargaccatgagctgtaggataatcacgcttcttcatctatcactctgaaaaagatagggcctagtagttagctgtgttctgtctctttcaaacaaggtgcaagatgtatctgattaaatctgtgactcttcattctttgtgaatcttcattctagtggcccaagactgttagctgctattggcgactgggaatttcagctcttttctgtatcaagttctttgagctcaagctccttgtgtatgttgagcgtgcacatattgatggatgttagatccattgttgttgctgttgatatttaatttcatgatagtttttgcagatgaaaatcacttctctagaatatgaagaggactttctgcaaggtgagaaaatagtgggaagccctatcctgtggtgcacaggacaaataaaaacaaataatttctaggagttaaatctttgttctccctgaggctccttaggtgcagtagtttattttcattacgtctcttgtaaaggcagcaccaatattaacaacgcgaacaaaacaaactaatgtttttgtttgctcccatctgaaagttccttaaggcccgtagactcatttacgaaaattcatgtgtgcaaaactcatttgcaaaagcaaataaaatatgtgatcgcaaatgctctttacctgactggcctaggggactagctgaaaatgcgtttatgcctttatgtttactctatggcgtggcttagcagtcgtggggctcctaacctcctctacagatgagtccccgtcaagccacgtatgtcagatgacttgaatgttttgaaattcaggcatcatttagatggttgttaagttgctgtactgatttgtgagtttttgtttgtaaaaaaatattattaaatcattgtgctctgtagccttggaaatgtttttgaagttcattcattacaatgttcagccaaggaaacatctctgtatttagttaagttcggacttttctgtccctttgggtttacatatgctgctttctttcctggtgaaaattttggttacaagtgtgactgagtgatgatgtctagataagggtcaggaaaactgaattgagaaaattagaaaaaagaaacccttatatgtaaattgtacataggaataattggaagctaccagaaagtttgttacaatcctgaatctttgctttttgcatagtaattgaaatatatgaggcaagacaaatacatacctgccagactctctgaggcataactattttttccctaacatttaaatctgtgttttgctttaggctgattgattgatttactcacttaacaaatattatttttttgttttgttttgttttgttttgagatagagtatctgtcatccaagctgaggtgcagtggcacgatctcagctcactgcaacctccgcctcctgggttcaagcgattctcctgcctcagtctctctagtagctggaattataggcacacgccaccatgcccggttaattttagtatttttagtatttttgtattagttgatgcagaatatatatatagacggggtttcaccatgttggccaggctggtcttgaccccctgacctcaggtgatccacccgcctcggcctcccagagtgccgggattacagatgtgagccaccgtgcctggcctgaacacctctgcattccaggctccaccctgggtagcagggatacaaaaatgaacacagcaacaaaaatctctgccttcaaaaactgtatatcctaatagggagacacatttagcagagtaatattttgaatattttactttttgcttttttgccccgggcattactgataatattttatcataaatttattgagtgtcctttatggtctgaatcctgaagtctaattttatcaaacgcaggactcccagacttttcttatgaattcttggaagtcagtaaataaaaattacatttgctttacggttaaaccttaattagaattcatcatcaactccatttactgtgtgtatatatataatatatatatagctatatatattatatatgtactaatactatgtattagtgtgtgtatatacatacatatatatatatatgtatgtatatacacacatatatgtactgcccaagaggccacatgttttcgtttttaaaaaatctgcttagtggctggatactttggctcacacctgtaatcccagctctttgggaggccgaggtgggcggatcacgaggtcaggagttcaagaccagcctggccaatatggtgaaaccctgtctctactaaaaatacaaaaattagccaggtgtggtggcacgcgcctatagtcccagctactcaggaggctgaggcagaagaattgcttgaacctgggaggcagaagttgcagtgagctgagatcgtgccactgcactccagcctgggtgacagagtcagattctgtctcaaaaaaaaaaaaaaaaaaaatctgcttagcaacttccatttgacataggtggtatgacacacaggttgaaaacaagaccaatcgaattaagtgacttgggtttttaaaaaattattcttctctttacagaagtctcagcatatttgaaatgctgagacttcttgttgaaacccagcaagcctgaaaagcaaaaaggagaaaccatttcagagaaattaaagcatcaacaactggtgtttatgcaggagtcacaaagtacccaaacagccacatatatctcagtttcattcaaaacctgagaaagcaaatcaatggaagataatggaatgggatttaaaaaaatgtatatatatatgcacatacatactgataatattctgggcatatatatacacttatatatattagtatatatatgcttattatatattatatattagtatatatagcattctggcaatattcagaaaaaatatatatatagttgttttgttttgagatggggtctctgtcgtccaggctgaggtacagtggcacgatctcagctcactacaacctccgcctcctgggttcaagcgattctcctgcctcagtctctctagtagctggaattataggcacacgccaccatgcccggttaattttagtatttttagtatttttgtatttttagttgatgcagaatatatatatatattctggcaatatttttccagtctcagaggcataagccatcttcttgaatactcattgagtatttggctgtatattgtagacacctggatgcaggtgatactatttcatgaaggtggtaccaactaatatagtactaggtaacactatggttactggctaaaaatgagagtcatcaattactgattgaaatttctacacacctggtgtgacacctcagttgtgagacatgcaacaaatgcttgataagagttaattataaattttgtgatgatgaattttttttttaacttttactttaggtttaggggtacatgtgaaggtttgttacataggtaaacacatgtcatggggttttgttgtacatattatttcatcacccaggtgttaagcctagtacccaatagtttactttcctgctcctcaccctcctctcaccctccaccctccaggagaccccagtgtctgtggtttccttctttgtgttcctaagttcttatcatttagctcccacttacaagtgagaacatgcagtatttagttttctgttccttcattagtttgctaaggataatagcctccagctccatccatgttgctgcaaaagacattatctcatttttttatggctgcatagtattccatcgtgtatatgtaccacatttttctcatgcaatctgtcactgatggacatgtaggttgattctgtgtctttgctattgtaaatagtgctgcagtgaacttccgcatgcatgtgtcttgatggtagaatgatttatattcctctgggtatatactcagtaacgggattgctaggttgaatggtaattctgcttttagctctttgatgaatggccatactgctttccacaatggttgaactaatttacactcccaccaacagtgtataagtgtttccttttctctgcaaccttgccagcatctgttatttttttgacttgtaaataataaacattctgactggtgtgagatggtctcagtgtggttttgatttgcatttctctaatgatcastgatgttgagctatttttcatatgattattggctgcatgtatgccttcttttgaaaatgttcatgtcctttgctcactttttaatgaggttgtttttctcttctgttagaaactgcaattacttttgcaccaatttaataaattggtttaagttccttatagatgctggatattagacctttgtcagatgcatagtttgcaaatattttctcctattctgtaggtcatccatttactctgttggtagttccttttgctgcgcagaagcagttaagtttaattagatcccacttgccaatttttgcttttgttgcaattgcttttggtgtctttgtcatgaaatctttgcctgttcccatatccaagagggtactgcctaggttttcttctagggattttatagtgttgggttttacatttaggtctttaatgtatcttgagtgatgaattcctttaaaaggttacattagattaaaaataaggttattcttataataatgttagaataatgtcaacctcagtcttctatattcttaggtgctttcttgaataagaaggaaaggggataaattacaaatagctctctggaaattatgccaaattcagggtatatttattgaggagtgcaacaaaggcatctgaaaaatcaagaaggaacaagagaccactagccttgatgttcccataatctttcttcaaaggccctgtmtaaatctttttttttttaaaggattctgtggttttattgattcaacaccataagttacactttagaaattaaggtatagtttacatacagtaaaattatacatattttattatactttaagttctgagatacatatgcagaacatgccaatgagctgctaatttctaatgagttgcaaagttgatgcatttaagctcttctttgttttctccaaccgccaggtagaaatgtcaatcaagrcagaaacaccaaaggtggggaaggaaagaaaagatgagagggacagtctattccaggcagataaacatctcttgaataagtgaggcatctcctgccctaaggaacatgtaatgaaataaaatagtaaatgagttcattcttaactatttctatcagattcacccattcccttacccaattctctgttatcttctgctctgtttgctccttgccactgagaaaatccggctgttttcaaagaacacaattggtgttgtgattcagacagtcttgccatcttgatgtaaatactatcaattgcagcctgtcacatcttcctccaatgaataagtgaattgcttccccacactgaagttcttctaaagataacacaagctgagaaactgcatctcatattatgaattctagcagcaaggactccaggaggcagccaggatatagcatcacaacagagtattttccaattcccctaattaaaaaaaatgtgtaagaaaaatagcttgctgttggaccgctggaggagaagatcaaataatagttaaacaaaatgaaatcattgttgcttattcatctggctgtagaaagaacttccaaaatttcagtctcagtggggtatatgtccctgaatttctgagtcaaaaatgtgtttgttaaacaacttcagtctaataagctcaggactcacacaaaataactgtatctatacctgccctcaattagatttgtctatgcactttccactccttcttctctgcaggcacaaggctggtttttcagaatcatctccttttctctaggaagagtggggtttaaccatacaggcagacagatgcctcccacagccttcaatattctcaaagaaagttcttagtcatctctgagtaacataatccaccagagagttttccctgttttcaagttgacatccccatggtgaccatyttagcttctttctagtacygccgtcgctgaacactggttccatatcgatgctcatacaatcttagtttgccattctttgacaagaaggcagaatctacagtgaatggaaactactgaaagtcccatttgtttttctccagtaaattaagaacctgtgaattataattttggtggttgttgagaatgctgtaatcctaacaaattccatataaatgcaggagactttctagatatccaattataatatttacatataattagtctgttgaggagtattatcttgtagcaacataaaatggttttatttttcccactctttactttcaactgtattgagttgaattctactttcctgctgggaagcaagttccttagcaacatctaatttcctgtcattttcaattattagtatagtctcatttgggtatttaagacctggtctttttcatttaaaaaatattaatctcaaacttgattcaaagtgtatcctccctctcccgcagttatttggagtgaatgtgtgtggatgtgcatgtgttttttggggagttctctggttctgagacacttttccttcccttctctaagacctatttcttctagagttgggggctgcgaggagggagggaggaggctgaggcccttttacatgcttgctggaatgtcagtggtgagtaggtctcaggccacactcaccctggttctgacaaatccctttcgatagagtgttctctgctgaaatggtgttaggcatagttttcctgggggagaccactccctcacctccacagctgcagaaatgtgctctgcctcccttggccttgtcagtgacataccatagctggggcagccctcagagcttcttcatgacggtgatggggaccactgtggtgtcttctgcctcctgagaactgagcagaactggatggcgtgggacttttccatctttctcgcaggcacaccacattgggtcccacataaatgtctagactttgctgggcattagacttcatgttcacgtgaacctcaaatttcagaggacgtatgtccaggctcccygtggtacaccatcctcccaggcctccagacactctcccagggactgtcggtcccctgctctgaagtggtggcagcacctggaggcctggatcctgctgcccagtaagggtccsgttgggaaagaaagtgccctactccacttctcgcaggtgcgctctcagggagcagcctgctgtcttgactttgagaggaggaaagaaactgccctttccctcaaacactgacctcctcacaatgctgagcatctctgattccctagtaggctggtggatgaggtctggggagagtgtggtacaggtggtacaggaggaatttgttggtgatagggccatttgtgctgcctctcaccaagccctgtaaggagatggttggcttcagctgctggggaatttctctagaatgtggagtccttacgtaactttagttttggaccagagcgtagttgtaggatgttggaatatgacttctgttatatatatacattacaacataggcccatagaaagatgcataacgggccggaagcggctggctcacgcctgtaatcccagcactttgggaggccgaggcgggcggatcacgaggtcaggagatcgagatcatcttggctaacacggtgaaaccccatctctactaaaaatacaaaaaattagccgggcgtggtggcgggcgcctgtagtcccagctaccccggaggctgaggcaggagaatggcgtgaacccgggaggcggagcttgcagtgagccgggattacaccactgcactccagcctgggcgacagggcaagactccatctcaaaaaagaaagaaagatacataatgatatacaaggatatatcgaaggccttgaaaagaccagggcacccctctggctcccttctcatacgtgatttacaaaaaacccactaacccataacaaattcaaagaaatacaacacattctgattttcctcatgactatgatttttttctcaaatgtcaaatttcaaagtcctaaaaaaatgtgagtgccctgcattcctggtgccccaaacacatgtttgttttgttgaggagccaggtaaaacctcacagtcttactgggaaggttaaatgagtgaataaagatgaaagtactctttgtgatctacaaatatatcctactatgacatataattgtatatgagattttctacatatgaatacacatacctataaaccttattttagtttggtatgtgaaaaataagttgggatgtgaaaaatcaattttactccatcagtctggagtacaatttttcatttaatttgtgtatactaatccattaagattacagccagtcttcagctagactgactaggttttaagcctgaatccatgattttagacaagcagcttaatttctctgagcctcactttcctcatccataaaatggagataataacagtatctacctcatggaattgtgagaatcaaatgggccaattcatataaaaacacttaaccttaaacatatgcctggcacatagtaagctctcaaatatcagctgttactgtatgcttgtattaactacatagaaaaatggaaaatttctgattttttctgtattttggatattttcaacagaaacgaagtagataaaactagtatttactttgagatcaaattgatttttaaatatttaccttaaagagttacctggggtgtggggttagagtggtatgagaaatctgttgatatgaccggaggccgacttacttgggtttagggtaggagcagtgcattgcaccggtttttaactcaaagagcaggacaagttatccaggagagacaaacagaacagttgacaacatacatgaccactcatattcccaagactgcgaggctggaagttcattattaagtaacagacctgtataacwmtttcttcctatcctaatttacacttgatctcattctgcctgttgaatattcaggtcccctctgaagtgctgcatgtttgcagattgatgttgaagggaaaattttgacctaaygattcttctcaagtggcttctcaatatttcctttattgtctcagcctcattgctttcctaccttctgatcatgcacagcccttattagctttactggcttacccaactcaaacagatttagttgaattttctggaaccagaggcagaccatttatatacttatttccttacatcttttctatttttgtcttttcatttcaagctttcattctaaattcatcacaggtgtgaggtcttagaagccttgatcttcccagcaaatatttgccaggttgtaattttttatttgttatcaacagccaaatttaaacaaggctaatcttgctctaatttggtttgtggaagacctagtcttggtattcagagaaagcaaatgtgaatttctgtttttttcttcagtatgtgttattcccttatccctcatgtactgcaattaattttttttaaacaaaaataatttgggggcaggagaaactccatttggacctgaactttaaacagaaactattttgccgagaacactgaaatatgtagagggttggggaggaggaaggcagctaggggatctgtttgatagcctattcttgttatagtcctctatctcatttttctctacctcaggggtgctactgaatgatcctagctcattgaagatgcccctctcactgcagcaaccctgagtgacagttgctgtctatgcatgggttcctgtagtgaccacctgctacaggctggatttgtagattgcaggggcacaactcctagttttacgtgcatatgtttggacttccatatgttgtacgtgtatatttgctaattgcagaggcagaatttctgacacatggccagggtgggaagtgagggcgtgctgcaggtggctgttgagtatgtcatgagaggttttctcaaatcctgagtttcagaataggtatcttaatcagaggctaaattcagatttgggtccctcaagcaatagcttacaaaagcacatgtttgtattctcctccttctacccatccctggttgcagcacgaggtatattccttgcctgtggctgctggctgctattatattagagcaccagtttctcctgactttctttttgtcggaacctgcaggtctttacctggccaagaagtctcaactcaagttgtgcctcctccaggaagctctctctgactacttcagtccagcacggtgtctcaatattctaaaccagtcactagtacactactgtttatgggccaaataaagacaatttttattaaaatacacctatatccatttgttattgtgcatggttgcttttgagatatagtggcagaattgaacagttgtgacagagaccatatgacccacaagcctaaaatatttactttttggctctttacagaaaaagtttgctgacctcatcctaaattgagggggcttaatgtgtgtatctttcagcatgacctgcaatgaatgctccttattttttggtttgcaaaactttcacttttaaattcagcatagtctttcagtatctcccagacattttggacactgaacaaataatctcaaaattacacttgaagattggggtgagtctgggcaagggacaaaaagaacccataaagcaattttatttttaagagagaaaacatttattactgttgttaggtgtttgcagaaaatgctctcagagaacagttttgtacctaaaccagttccttccaacccgtaactattacttgttactgacctcagtttaagaacataaatcttatcacatttctctaaggatgcatgaagatataactgaattaaaaaataatttatatggaaattcaaacacacatgcacaacattagaaggttagcatttgctttaaaaaataatacttaatgggatcctttcagatgctcatgtgctccactttgccagggtctgacttgtgataggtattgaggtgagaaaatacttaactcagtgattcaaagttagattcatttagtttcttctctcctgcctagtggtcagcccattcccagggtggagtatactgaagaagaaactaaaacttggggtgttgtattccgggagctctccaaactctatcccactcatgcttgccgagagtatttgaaaaacttccctctgctgactaaatactgtggctacagagaggacaatgtgcctcaactcgaagatgtctccatgtttctgaaaggtaagatttcacacaggctgtctcttattagtcaatatcctcaattgccttccaaggacacaggttgcagcaatggctctttttccaaaaaaggaaaaacagtgatttaaaaaattgttggctttgagccaacaattacctgcggccacctgtgggaagcagagcaagggactcagctgcttttgcagctcaggagcttgctgaggcctctttgtggctggttgttgtaaatggtaaggcccaaaggatatttgcaagttcagctctgagctttttctgatccaggagctgctgtgctgggctacatgagtatgaaatgacctccaaaagtgcctttttatttgctttgttaaaaagtatgtactgaatgatgatattttatggataatgttgaatattagtgactttcctctaggagaaatcaggcaactgtcagagrcgtttggaccagagcaactccttcttgaataggggctgggtagaatcaggctgagacttattgggctgcattcacaggaggtaaggcattctaagtcacaggatgagataggaggtcagcacaagatacaggtcataaagaccttgctgataaaacaggttgcagtcaagaagccagccaaaacctatcaaaaccaagatgacgatgagagtgacctctggtcattctcactcctcgttatacactaatcataaggcattggcatgctaaaagaccctcccaccagtgccgtgacagtttacagatgccatggcaatgtcgggaaattaccctatatagcctaaaaaggggaggaaccctcagttctgggaattgcccacccctttcctagaaaactcatgaataatccattccttgtttagcatataatcaagaagtaaccataaaaatgggcaaccagcgatccattccacagctctgcctatrgagtaatcattcttttattccttgactttcttaataaacttgctttcactttayggactcactcactttgaattctttgcgtgagatccaagaatcctcacttggggtctggaatgggacccctttctggtcacacaactagtcaataaatcaatcaactaattgatcaatactttacattataatttgtgtgtcagggattgtacttgttgctgatgttacactagtgaacccratgaatcatacagtgacatcatttcacactctctgtgggtcccttcactgacaacacctccttggaacaatagctgggaaataggcttgtgaggggttgggggaagaggcaaagtttcacggtggtcccgctttctcctctgtttttccttgtgcttaagtccttggattctctgcccttttctctctcttctttcaagtgcagtagttccaaaagcaaaaacttcattgcctgctctctttcctggaacttgctttcttgcttgtcttctcagwttctatcagtactgttttttctaaactcatcaggcttgcctctaaggactcccctgaattcctacccactttatcccccaatcccatactcagtccttctttgtgttagtgtccaattatakctgtaacaacacattaccacaaactttgtgacttaaaacaacacgagttatctcacagctctggagctaagaagtctaaaatcagggtgttgacagggctcattccttctggtggcttctgtgccctggcctttcccagcttctagagtcctcctgcattccttggctcgtggactcttctttgcatcactccaacctcttgcttccattgtcacatctccttctctgactctgacccttctgcctccctctgataaggactcttatgattatattggccccacccgaattatctaggacagtctctccatctcaagatccttaagttaataacatctgcaaagtctcttttgccatgtaaggtcacatactcacagattcaggagattaagacataggcatccttggggggccattacttagcctaccacaatctccccctattgccacttatggcttcatgacatgtggtaaatctgtccttttcctttctgttctactgctatcatccaaattgakgtcctcatcattttataaccttgatgcctatattttcttcccttaactctcctgcccactgcccataaatgttactttctaaaatattacttttttttctgacatctctgctcagaaactatcattggctccctcttgttttcactgggactggcaaattttttttgtaaaaggccagttggtaaatattttaggcttttcgggccaagaggcaaaatcaaggctattatataggtacttttatagccattttaatgtgtctattaaaaatataaaaactggctaggcacagtggctcacacctcagcacatggggaggccaaggcaggcggatcacttgaggtcaggagttcgagaccagcctggccaacatggtgaaaccctgtctactgaaaatacaaaaattggctgggcgtggtggtgggcgcctgcagtcctagctacttgtggggctgaggcatgagaatcacttgaacttgggaggcagaagatgtagtgagctgagatcacgccactgcactccagcctgggtgacagagtgggactctgtctcaaaacaaacaaatgaacaaacaaacaaaactattctcactkttggggtgtacaaaaacaggcagtgggctggatttggcctccaggtgatagtttgctgatctctgttttacacgctcaagtctgaacagctcagcctcaatgtgaggccctgacccaggtttccaagttagtttcctgctgcaactgccctgtacaaatcctctgcccttgctgtgggctctctttaccgttgcttaaactctgttccttactagaaaatttcatctcttctccacctactcaaattctacctattcttcaggactcagagcaagtcctgcctccttcatgaatcttgattatagaagccaccatgatctctcccactctgatttcattctatgttatgtgtgaacatcatctactatatttgttactgaggaaaagagattgagaactaccgatcagtatcacttaattagcacctaattacctcatgccttatgttgttaactagactgtattctcctgtcatcttcttctttgtgtcccacagagctatatgcatattacctctttaccaagagctccttatatcgagatggctttttactgcattgttccccaaaccccaatagttagaatatcacctcataaatactgttgtatttgccccccaaattaatattcttatgagaggcagtatggtatagtggcttggaccatagaccctggatgtagaatgtcagggcttgagtccccactctgccccttcctagctatgtgaccttagaagagtcaccttaacctttctgtgtctctgtttcctcctctgtcaatggagatagtaattttatctacctcacaaggtggttgagaggagaaattaattgatataccttaaaggcctaatgtgcctaacacacattaagcatagcagagtcttagctatttcctttgttattgttttccacaacccttggtgaactggatatatcgcctagtttgtatcacgcactggcatgtagatagtatgatgtaagtataggtgtccttatatcatttcattgactcacttttaaaatacctaatttatttaaaacagaaacttttaaagcaatggtatctacagattcaaagttcttgatgtcatggttttatattttttctaattcacataaaaataaaatacataactattaaaaaaaatgttcctctgtgtactgttacatatgtcccacatgtgggatatactggcttaattgatgtaatatggaaaaagaagaaaatacacttatctttttgatattcaccggggaataatccaaagtgaaggcttttggaatgaacatagtgctgtgcgaattatgggtctgaggaggcctgagaacaggttatttccagcaggtaccagaaatcccaggatgggcctgttttataagcttagttggttcttgcctcttaagatcattttcaaccattgtgtggtactctcctaatgcgttaaaggaatagccttccaggacgttatgctaaatgaaataagccagacacagaaagaaaaatactgcattatctcatatgtggaatttggaaaagttaaatacacagaagcgaagaatagaacagtggttacaaggggcaggaggtggagtaagtggggagatattggtcaaagagtacaaagttgcagttagataggatgaataagtctagaggtctttttttataattattattttttagataagagtcttgctctgttgcccaagctggggtgcagtggcgtaagctcggctcactgcaacctccacctcctaggctcaagcaattcttgtgcctcacctgtattccccgagtagctgggactacaggtgcgtgctgtctatgccagctcatttttttatttttagtagataaaaagttttgccatgttgcccaggttggtctcgaagtcctggcttcaaaccatccacccaccttggcctcctaaagtactggtattacaggtgtgagccacagtgcctggtaatctagagatttaatgaactgcatgaggactgtagttaataatatcatattacataagggaaatttgttactaaattttatgtgctcttactacacacacacacacacacacayagacacacgcacacgcatgtgcacatataactatatgagaagaaagatatattaatgaacttgaatgtagtaatcatttcactattacagtaaatcctcacttaacgtcatcgataggttcttgaaacctgtggcttaaagtgaaacgatgtataacaaaaccaatttttcccctcatcaacattatgacaatacaatgttgaaggaaatgatgttattctgggcactgctttatgtcattcacttaaagtcgcaattttcaagaacctatcgacgatgttgaggactcattgtatgtgtgtatcaaaacataaagttatacaccttaaatatatacaatttatattaaaaaacagaactgctcttgtgagaaaagaacagaacataaagcagccatttaaaaatagtcatgtgctacatatatactgttcggtcaacaatggacctcatgcatagtggtgatcttatcagattataatactgtattttcactgtaccttttctatggttagatatgtttagagacacaaatacttactaatgtgttacaattgcctacagtattcagtatagtaatgtgttgtacagatttgtagcctaggagtaggctgtaccatctaggtttgtgtgagtacactctatgagatttacacaacaaaatcacctaacaatgcatttcctagaatgtatccccattgttaagcaatgcacgactctatacaacattttaataaaatgcatatttaaaaaaaaaaaaagaatagtccttctgctctaagttttctgggccttcctgagaagaaaacattaagtagcccttagactgagaacactgatgactcacaacctaattgaattagtggtatagggcaggtttatagactttattgcattcttactttgtttcctcttaccataagccaatagagcaagcagggctttggtgtacctcttcaaatcatgataatttatataacawcacagaaaacaatatagagtgaaggagttagcgggtattggcaatagaaagcctcagtatgaactgatttgaagatgctagtgaagggggtgcttagctgtgtgtcactgaacacatgcacacagaagagatccctaggtatgtctcttagaaagataccaggtaatgtgcggtaagcatcactttcgattgtaatcaatttatctgagatttcttatcctaattgggcttctgaatttaaatctctaaatacttttttcacccttcttttcattttcttgaatgttttgttctcctggaaaccgtcatttgagagtgattttagtcatcagaagcaccaaacatgatagctgttaacagtatatgtcactyagttgtcaagaggtttatgaccttgrttactttgtttctggatcttccttataaatagtagaagctcctgcttgggccctcaagtcttgctgggttaatatttagttggctttttctgttgcctttttagaaaggtctggcttcacggtgaggccggtggctggatacctgagcccacgagactttctggcaggactggcctacagagtgttccactgtacccagtacatccggcatggctcagatcccctctacaccccrgaaccgtgagtacctacattaaagcccaggccaccacaccataaagtggtcaatgatccctttacttgaaaatgacttaggccctgttttacctccaaactaatttccttgagctagtgagagtcacatcactcacctaaagagaaaagggctcactgaaggatcagactcctcatctgggtccgtgggggcccctgatattccagctctggctcgatgctctagctttatcccaacactgagccatctgcttggccagatctccatttctgatgatgaagagaaggcacagaagtgtaaagtagacactgacacatggtcagaacatgtgaggctctctcattaggaggcctctttcatgtgaaggaggttcatgtacacacaccatagcaactcattactaatcccctctcatctctttcgtcacctccaaactcagaactctgtgctttgctctccctgccattttagtttcttgaacacttctctagtcctgcccgccacctccagatatagatgaggtttgtgattcttctctgattctgtcagttttcctttggggcttttatccattctctcctggacaatgggtaagctaggagtggggagagaagctaagaggtgatgctatactgctctgacatgggtaagaagcaggagtaagctgggaacacccacatgttaatcatttggcctaatcacacgtgggattgtacagtctccaagtgtgaaatgccctgtatcatatttctttgagtgctttaaaatatgtaacaaacatttactgggagacaactacatgcttggattgtctgggaatgagacagcattcctgcccttycaggtgaatggtgaagacaatggttagcatscagacagacagacagacsgggaatatggtgtcaggtgtaagtgcttccatgaagtgctaataagtgctgtgaagacaaatagagcatggcaaggagatggagagtcctgggtgctattttttggattgggtcaggacagcttcttggtaaacatctgagcaaagacttgaatgtgtatatgatggggtggagaatttcaggctgaaagaacagcaaaaacaaagaccctgaggctgggagctctgggttcttttgccttcctgggctccattaaaatgagtgccttgctttaatcttaccccactgttcttcaggccactcagggtatcgctttgcttatgatgctgctttacttgaatgcacttgtggttaatgggttgccatggtcttcgctggggagcagagaagcttttgaggttcaagcagttaagtagctgatggtagtagaagtgagcaagggtaagtcaagtccctgaagcacccctcattttcctaggctggcataaggctcacagtccaggtaggtccctgtcaggtcactacatttttttttttaagcttttttcagcttccctgaaagtgttttcagggtaaacagaggttacttataggaccccagacatttggaaaagaaatgcttctttcagtggagtgagtgctcaaagaagcactgtcagagttagaaaggcaatctctaaatctagcccagagggtttaccaatggccttgtttacaaatagaaggcactttgttagttccctttgaataactggccctcctgagacctgtgacagcgtgccaataggtatgcagagagagagagagaggcaaagaaatgagattttagccacagaggataatgtgttacatttttaccaaagtactttcggccaattcactcagcaaacatttatgtgcaatgctagcagggcagtgcagtggattcagagataaataaaatatagtagctttaaaaaaaattttttttaaagcagttcacattctggcagcagagatagaaaaacaaataattaggaaatagtgtggttagggttataattagtgtgtgtaaaaagtgctggagagcacagaggaaggcacagtcctgaaaggcttttcagagaacgtataacctgtgtgggagtctggaaggatgagcagaaatttcatttttgtacaaggctggacggggagggaaggggaggctttgcaagtcaggggaaacagcaagtgcaaagttgtggagacacgcaagaggcatacatgtgcaaggcttgttagaccagaatagccaggatacagtttatgtattaggggtgaaatgtatcttcaggccatgttataaatgaccatttgtcaaactaggacatttggacttagttctgtaggcaacagggagctatccaaggttcttaggcatagtcaggtaagtgtattggagaaaaatgactgggggtgagggctggggaattgttgagaatgaacaacacagaaaaccagctagggagctcacattctatgaaggaatatagttcaaaaggtgtggagctagatgaggtcagaggtatagtacaagagggcacctatttaatgccctcttaacaccatagagatggaagtaacaatatccagtgactacaataggggtgagacgaggggagggcccctaaggtagggctaaggtttttgtttgggaagctgagtggaaagtcatttctaataatgactgagaatattggaggaggatcaagcttggagggaagagaaaaggaaagagggagggaagaggaggatttgggtttggggtattttgtctgtgaggtgcccatggctggaacctccagatggagaagtttctggtagttacaaataaagattataaactcagaagtgaatgtaaagcacccacaatagatttgagtagttatttttcttccaagtctcctatgactacacagataagaggagactaagtcagaggatggaaacttgggattcactcacttggggttgtttttacaagccctttattttttgtgggtttcatatcattcgtattttttttttttttttttttttttttttagacagagtctcactctgtcaggtgtagtggkgcaatctcagctcacggcaayctctgcctcctggattcaagcaattctcctgcctcagcctcctcagtagctgggrttacaggcgtgcaacaccatacccagctaattttttgkgtttttagtagagacggggttttgctatattggccaggctggtcttgaactcctgacctcaggtgatccatctgcctcgacctcctaaagtgctgggattacaggccattcatttggtttttaaaattattactttatgaataggtaatacatatgcataattcagaawttaaagttcactaaaaggtatatwctgtgaacagtgagtttctttccatcctctgcccccttgatacccagtgcatcctctccagaggcaaccactgctactagtttccatttcatccttccagaaatatactatgcagacaaaattctctgtaaagatctttttaatccttgtatattgcaaagtcctaagtcccttctcagccacatagtttgaatctatgggtactatactgggagggctgtttcctgcccaagcactttcacaggcgttgtctttgtaatgaaatcccatttcctcaattgaaaaccaactagagggcagattctccaatttatgaagttcaacttgtctactgtgtttgctgcttgtactgtgtttccaaataactgctttcagttgctgaactgttgtagtggaggctgcgctaatgagacaaaggtgagcactgaagacccaggtagaaatgagcatgaagcaacaaaaaatacattatctgaaaaragaattttattttccctttcagtctggtagaatgtattttgccatcagagctttcaacacacattggattttaaacatatcttcgacttctttttacattttacagttttaaagactctggcttctctaaacctgatacactagaaaccaaaccttgccttcacacaatatattcctgtaacaaatctgcacatggactccctgaatctataaaaataaaaaaaaaaagtgatggcagattagactggtttcctgggggaaagttttctggcctggaagacaataaagaacccctggcaaattagtgacttctggttttcctggtgggaggagttgcttttctatgcattaatgcctggattgaaaggtcactgatctgctagaagaggaaatggactcttgctttttctccctttgagcagtgcctgaggcaatgaatctgcatttcggtattgcctggctccatgctttgatcagctgtggttgcaatgttcttactaattgggtaatgaagtttgcaaatgatttcctttaaaaaaaatcaattgggccaaattcaaagttattccaataaaccttccctctcactcactggaatgagagggaaagatgcagagttccaagttatgtaggcatgtgagcgtcgcctggcatgtgtacagtggcagaacaaaatcttgagaagttctaaatctccctgatctcctttttgtctctctgggaagtccattgtgtgctctctcatgctatgccctccgtccacctcatcttttagaacagggttacttgcagatcctaggcagagagggtgcagtgtatcaggaaagcagtcctccttcaaccctgggtcctgtggatcaggaatggagagtcaggcagagagagaaagagagagagagagagacagacagacagacacacasagagagagagagacagagagagagagagaaagagagagatagcacaaaccmtggcaactagcagtgtgtgggccccttaaggttcatggtgagatgtctcagtggtctgtttaaaaggcaaagtgagggcccagtctgcaaggtaggaacgataactcacagttcttatcactggcggctagcttgggccatatgggtgtggtgttctatttctaatgccaaagcagcaccctttgctgtgttgttcccattccacacatctcttcttttctgccggcatcacttttcaaatcaaagagcaaactttcagcattgaggaataattcagggcacmagtgactaatattgcaacttatattgccrtaatacaatgaaatacatttgtrttaaggaacatcttttttgttgcagttgaccagtttagtggcaattaatgttatttttaaatataactgtttaaaggctttgcagtcaggtgatttttcttataattgccgctgtttaattttataagaaaaataaaagtgaattatttctgacacatttttcatccgtttctaagtaaagtaaatgaattttttgcttattaggaaagcttggttgctcctctcttgattgaacagatgtctctcactaggtccataatgagaggaaaaatatgaattttttctttcccaacttttcctccttgttcccactcgagaggttctgggacttgggccctggctgttgttggtgtttttaatatcaggccttgctgaagtcktctcagcatggtcttcctgcagagctgggaggataaaccagagctttacggagtttaacctgcatgcccacgagctgtgtttagcttaaacttgttctttcccatgggacatgtgagcttggtgccaagcctcctgctcatccacctggcttcctccatagcactattaccattcttgctgctcaggattgcagtgcagcattattactggtgattcttggaaaatggcatgttcccagaaagccggtcatctggcctacctttcctgctttgtaacyggtgcacataccctcagtttggtagccatgctctcccttaggagaagtccggtttgggctataccgagggccagttaagatgttagaggccccaagacctgaaaatactttaattccttccatccttcagcatagataatcttgacagcaaccacaacagcagtagcaacaatacgtttattatgaatagcaaacatgtctactatatatcaactggacacaggtttactgttaatagcaccagacactattttaagtgtaatgtatggatggactcacctaatactacaacactttgagttgttatattattattctgagttwatagatgaggaaataagacacagaaaggttaagtacattgcccaaggtaacacagctggtaagtacgtgagtcagggtttgaacttcaggagtaatgccagcacctgtggccttagccactactttgttaatcagtaacactaaacaaaaatactcaaaacttatttgtatgctgaagctgaatagcatttttgttgttgttgttgttgttgttttccaatggcatattttgtagaagggatttgaaaaggctactttctttttttattttttgagacggagtcccactctgttgcccgggctggagggcagtggtgcgatgtcagctcactgtaacctccgcctcctgggttcaagcgattctcctgcctcagcctcctgagtagctgggattacaggggcccgccactatgtctggctaatttttgtatttttagtatagacaaggttttatcatgttggtcaggctggtctcgaactcctgacctcgtgatccagccacctcggcctcccaaagtgctgggattacaggtgtgagccactgtacctggccttgaaagggatacttccttacttttatttggtgaccctgatttgctagaaccctaaagactgtttatggctattatatagtttagtgctgtgctgccccatccagttctcggcccaacttccaggctccttagaggcctgccctcccctttgatcttcacaaggtcacagttggtctgccccatttatcaagaggaggaggcatctgctatctcactgggagaaagaaggggacagcacctctctacagtattgagcatagcttatatgctaggcttttctaagcactgcagacccaaatatgaacatggcctaacctctgtcctggagaaacttactccttcttaagtgacaaagtaccttctcaaagggcagtaatgcaggtaggagactgctgtgtcctcaggcagaaggacctaaggactgattgcccagaaatgtaggcccctctctcagctcccagtatgactgtcggcaagccatttaacctccctgtgtgagagatgatgaaataacactttgatctttggagagaaaaaagctttakaaaaataccaaataagtccacccttactcggcacctcttaaattcatgtggagggataatgtgcctcataaaattccagtgcgtccttagttacaaggccacgttcctagacctggactcccaagttttcaatcataatattgtgtctagttttgtgaagtgcctaaagcaaaaataacccctgagatttcttatagagccttttgtctaaagagcttaagcattctaacaatatacattccatttttaaaaaatcatatacattatttaaaatgtgcagttwgaaaccaaaattgtgtctaactgtctgctggagccctgtttttgttcttttagactgttttctgtagtgacttgggataaagcttcaatacttcagccacccttcttttttttttttttttttagcagattcaaagcaggattccttatgtsactctcccctacccctgcacccagttytgttttccttgtgcggagcccataatccaaaattagcacttagaagcacctggcccaaatcaaaatttatattccttcagcactctgtagtcagggagaggttcattatgtattttcaggtgtggaagactgagatgaccagggagaaatttttccaggagtatttgcatttttaaattgcaagttcagaagaagaaatccaaaatgattgaattttatgcaagaaagaggtaatcactgttcatacctctttactaccgtgtagagaattgtgtctgtgggtgggcacagaagccaccacaagagagaaggaaagagggagcagacatttcccacacacgttctgtttgtctggcatcatcccactcatctctattaggtggacaggattgtcaccattttacagatggcaattccaaggttcaaagaagtcaggtaatttccctaaggttacacaactagaaaatagcaaaaccaagttctggtccaaagcctttatgtgacactggaaattaggaaaaccatacttgagtttcacttggattcacttctatttggaacaacagagccccatcatcacctgctctattcagttgagttaaaaaagcagttattgagcatatcttatgtgccaggcttttttaagcactgcagaccgaaatacgaacatggcctaatctctgtcctgaagaaacttactcctttttaagtgataaagtaccttctcaaagggcaaaacttattcaagtatgataggcttaggtataaatacaatttaatataataagtaataatacctaacttacgggaactaagattttcaatgcattctcttactacattgtttaataatgtaagagatggctgggtgcggtggctcacgcctgtaatcctagcactttgggaggctgagacrggcagatcacctgaggtcacgagtttgagaccagcctggcccaacatgataaaamcccgtctctactaaaaatacaaaaaaattagccaggggtggtggcgggtgcctgtaatcccagctactcggcgggctgaggcaggagaatcgcttgaacccgggaggcggagcttgcagtgagccgagatcaggctactgcactccagcctgggtgataagagtgaaactccatctcaataaaagaaaaaataatataagagagaagaaatcttacaatcyccaytttatagatgagaaaacactatgtctgtgctgtccaatatggtgagatgtggttatctacatttattaattaaaattaaataaaagtacacatttggttcttcagtagcactagccacatttcaagtgttcagtagacacctgtgtcaagtggctattatattgcatggtgcagatacagaacatttttatcattgcagacagtccgattgcacagtgctgctctaagtaatttgcctacacaagaatatgagagatgaacttaggtctgactgtagggtatatgctttggactgttgtgttatattgctttcttaattacactgaacttggagaggtggagagaaagttaaatgtctcttatttcttcaagaaataagaaacacttcagaaatggtgggtgtattaggtcatacttgcattgctataaaaaatacccgagactgggaaatttgtaaagaaaaggggtttaattggctcgcggttctgcaggctgcacaggaagcatagtggcatctgtttctgggggacctcaggaagcttccaatcatgatggaagacaaaaagrgaacacttcacatggcgaagggaggaatgagagagagagttggagggtgtgggccacacacttttaaacgaccagatctcgrgagaactcactcactatcccgaggacagcaccaagaggatggtgctaaatcattaaagagaaatccacccccgtgatccagtcacctcccaccaggccccaccttcaacattggggtttacattttaacgtgagattttggctgggtacaaatatctaagctatatcagtagggagctagtgatataccaacagaatttccattgcactctttctgtggtccctctaagaactggaaattgtttctttttatgcatcaggaaagtttgtacttgctatttgattgccttttyctggaaccagatggtgacttttgctaggagttattctaagattatgccttatttacttttaagccacatttcctaatatagcacctggtacaaataggcacacaatgaactaaattttaagaaagacaactataatatctgccagtcttaaaagaattgtagtaaagaagagaaacatcagtgcacatccttatgattcctaaggggaaaaagcaaagaagattttccccaatgcaacatccaggttcctggctttattaaaaaaaaaaaaaaaaaaaaggtgactttttgtagctatactgtgatagggatataagaaggagtgatcataagaattgcctaaaatcttatctgggtcagattttacagtatgctattttaaatctaaactaaagaaactctgtatatggctccaaaacaagccctgagaaaaagttgcctcactaccaagttaattccccttatcatcttatgcagtgaaagcaaactaagtcacctgtctgcaacgcatcccagtgtgttatcccacattacttgcatttacccatcaactgttgtgtgaaagctgaaaaacgcaccctattttggctcccagctcatcctcctgcttccttttattaatgcaaagtcttcacctctgccactcatctccctttccttctcttcgtgatttagctaaagtgttggcttctgtgtcatttagagcaaacaaaacctaaagaaatatgttttaaaagacagatgtgcagattttggatgggaagcaaatgttggatgctcagtcaattcctcgtaaaggctttaatttacaacaaaaataaaaaggagttgttcaacgcgtagtgtgaagagtcagctttgaaaactgataagaggagaaaaatgccagactcattttgaatttgaacttaacaaccagaacccttatttcttcatagcaaaatgatggctactttcttggactgagttaagaatttcccagagacatttcgccgaggctcctttgtggacctgtttctgcaggctttagaatccccctagcagggcttatcagagaagattccaatttagagcagcaaaagtttagtgtctgatatcagctcttgctttttttttttttttaaataaaaaggagacatgatgttttacagtgttaacagctttgaaaggtcttgtatttccagtgaacagagcacatttgtgaaaaggactctaaaaagcattattcaggcaaaaatgtatcaaagggatgggagttaaaaagaaaaaagtttgctgatgtagagattggaggcagcatgtactgacaggtgcaattatggccaaataattgaatctttttggagagatctggtgagataaggcaatagttgtgaactcacatcgggaacctgttcataattagatactcaggggttcggctgtggatgatacaaccaaagtagggatctcaaactactttacatgcaggacacagcgcagtggcatttgcactttgtaaaatagagtttaatagcataatttcagcccaacagaccttaattggcacagaggttagagagaaggctttgcagtttgcattctccctcagactccccatagcctggaacccctctctgccccaaagagtggaggtgacttcagcttctaagtcctctgcagagaatctaaaaaaatgtaaacttttcaaagttaatgaattgcttttattagtaatgttaaaaatctttgctctttgtttgaagagtttccaggcacttcaatttcctttgtctacatgtacctgagccaaacacagtgggatagagaacaatatggtgtttatttctgagaaagtttcaccaaagacataaaatataataaccttgttcctggtcttgaaatacaggtgcttaaagccttggccccatgacatgctatgtccacactttgttcaggaatctgaagggaagttctttctcagggtctctgcgtggaaatggagctgagaagtgggcacaagttagcaaaatacagcatggtcatttctacttataacagagcaaagagtatctctgaggttccattaataattctgctagacaactcgcttcaggctttcattcttaatgaaacaatataacttactctgctgtattgtatgatttttttcttccaaatttataatttcttttatcctcttctatgtgtagttagattactttgtcattgcaatggtattaaaggttcttaagttggctagtgagttacaggtttctgataatgacgtcttaacactcaggtgatagctcctttttctatcatggagaactgactcctgaatgtctttggatctctagtattttcctaactgctaacttttcaccttacgttctaccagtaagctttcggactccattagtgtctaagtagacagaagactgtcttttggattggctttcttcaagtatttaacaagttcaaaggtaaattctgtactgcaccaagcatctaccaccactgtagctttgacctaccctattctcttcttacattatgaagcatttagcacagtgcctggctcatagtaagcattcactgtaattgttactttagtttccgctcaccttgtttatgtcaatgagagaatactcatcatcttcagtattttcttggagtttgacatagtgactaatttaaaattattgttgccacatcttctgcctggatcagtgggagatctttagcatttacatcatgagccacaatggaggttttcagatttttccatggtaggttacttgatcttaattccaatattggtgcaggcggcatgaccttttaaaaaaattgatcgcaagaatgagtccatagggtccactcccggcttagaactactggacttgtaactgaatcaaatgcacatggagaatgaattagttacccatctacctctcagtcaccacctttaattattcttcagtatcatggtgtaattttagtggaattaaacttgaacagctctaaattacataatcacattcagttgtagttttaagtactagttgcttgaagcttgctaggagagctcctagagtcatcagttatcacagtgaatctcagccctggctgtgtcttattatcacctggtgagagtttaaaaaaaatgctcaggtttacctcagggagcctgattgaattagtctaaggcagggcttagccattcggtatttttaaaatgctcctcaagtgatttggaaagttgagaagcactgggttggaggaaaagagacttaggaaatactgactacatttttacttgtgctagctagcttggctaaactctcttcctacggcctaagctatgtacgccccagcccctttcttgcttacaccatacctgcaaattgaaacaacagagagcagaaagagtgtagctttggagttcaaaaaatttgatttcaaaccttgtctctgggctgggtgcagtggctcatgcctgtaatcccagcactttgggaggccgaggtgggcggatcgcttgaggtcagaagttcaagactagcttgggcaacattgtgaggaacccccacccgcacccccacccccgcccctgacatttctacaaaaaattagccaggtgtggtggcatgcgcctgtagtcccaactacttgaggggctgaggtgggaggatcgcttgagcccaggaggtccaggctgcgatgagctgtgattgcactactgcactgtagcccgagcaacaaagggagaccctgattaaaaaaaaaaagtctctgtctttgccaaaagtgtggtagcctaggaaaagattcttagatttactaaattttagcttcctcatttgttaaattggaataataaagcttctcttatttatatttattattcctttataaaacacgtaaggaaagattcagttaccaatgtgacatgaaaacatttagcacagtacctagtacatagtaggagctcagtatattctctctctcttctttatttttcatttcttcatatgtaaaatgaagggcttggattacatttaaatgcccctataccctaaaatccagtgaatctgcttctttgccataagcaatgtgattgaagaataaccacctcgtatgccttttgttttaaaaaacaaattcagttcagttcatgtaccaaaaaagaagttattgacacagttgacaagggatgaatttggagtttgtttcagtatcctgtccactattctcaagtggctgccctttcaaccttctctctatgaagtaactggccaagattggggatacggtttgagttgtgggaataagattttttgattgagtgattgagtgatgctatctgttttatgtgggcatcaatcttggcccttgaccatcattcatttgcttcaactgtgtgaccatccaacatactttttaattgtaataatggtagcacctggtatttgtattctagcagctatttgaagtgatagatttcagaggagtacaagtgaaatcaaaactatcttttaattactacctaggtaattggtgtttttttcagtcaataatttaaaatgttcctgcatctcaatccattcccagacaaccataggggaattcaatccattacagcttggtatcacggaacagttcattattcatggcaatgactcaggaaggcatctgccttgtattgtcgtgaaagatacctgtcttttgctcactttyctggctccaaatgaaagctcaggcaaatgagagaggttccaggcttctattattacctagttcaggctaaccaaagcagagaactgggagattttctaatgtgttatcacaagagagttgcttatattagagccataaatcatctactggaaaagcaactttgatgatgatgacaatagaatcctctgccattacccattgcctggcagagtgtaacagagttgcagtgcaccttaagggttaacagcaagagttgaaaaacatgacaaattggattccaattttgtcttcctcactatctatagcaagaaacagcaatttttttctgtaaagggccagctagttaattattttagccctatgatctcagtcacaactactcaactctgcagtgtgatcaaaagcagccacagataatacacaaatgaatgggcatggctatattccaataaaactttatttacaaaaacaggcaatggaccagatttggaccatggctgttgtttgcctatccctgatctacaggatcctgtgctaacaagttactttaattctctaaaggttgttttgagaataaaagatataaagcatacaataaaacacttaccatgtacttggtatatagtaagagcttgaaaatagtagttgcttttatgttattaaaacatggtatatcatatgttttaagtgctgttgattatgagatgcagtgggatttcagacatattaaaatgattaagaagtcccagcattgatgaactgtagtaactaattaattacagtgacaaggtcttatttaggtttttaagtcttgttctaccagtggtaatttaaagcttcttatttaacacgtctttgtgatgtcttttttgtcagagacacatgccatgaactcttgggacatgttccactactwgyggatcctaagtttgctcagttttcacaagaaataggtctggcgtctctgggagcatcagatgaagatgttcagaaactagccacggtgagttcattttcaacttaaaaccagtkctatttatgtccatttgtaaggtaaagaaagcttcaggattattgactaygagttataggtaaatgttctggagaaaacatggtgaatttaccttttcctatgttgtattcttttgaagcacaatgagttatcagcttattgaccaccaaaacatttgtattttatcattcttgttcgggggtcagctagagataaagggctagatagtaaacatattaggtttgtgggtcgtaaggactctgtcagaattactcagcttagccactgtggtatgaaagcagccacagacaacaaataagtaaataaatgagtgtgactgtgtcccaataaaactttatttataaaagctggtggtgggcagatttagcctgtgtgctgtggtttgctgactctcacagaaatattagtaatagtaaaaggtatacatatatgataaagtaggggttgcacctgaaactctctckgattattctaggtggttgtagtcagacataatttgagtcaacaagcaataagacactgaggctcaacaattattctaagtacaaaaccaggaaaagatttaatggatgttatagtatcttcctaaaactgaagttcttctgaaaacaagcaatatgagagaaaaggtttaatgttggctgctacctttaagatgctgaagggccagatctagcatgctcatatgctgtaccctagctccatttctaagggcccaggaagagaaaaagcagttttagccaacccattacctacagggaccagtcagttagcctagtgagcaaaaccaccaagggatgaaaaatgcgatcttaaattgtatgtaytcagcacaggtacaccacagtggcatatttgatatgcaggaatattcttcatttccacccagaaataagttttctcctagatttcttaaaaacacacagatctttcagtacatcttttgtttcctacttttgataaaaatataggaactgggagatatttctcaactaaaagataaatagcaatgcagaagccatctaaatggcaaggacctctggggtcagtatggagatgaataggctctggtgggggctgtggtggacaaggacagcatgtctcttgtatagcaggttctcagcttttactgcttgttgccagagatgggatgcaggactttgtgttgctagagatctcctaaattttttagagagactggcaatctagatttctcaatgaaatttaatgatttttaaatgttggcttattaaaaaaagtcccaccattatagctgaagaaaatatatttgtagactgaatctagatcttggcttccaatttgtaacttctggtataaggattgtgtctcatttgtattggctatccatcacgatataataaattatctcaaagcttagtggcttaaaacaacaaacatctattatatcataatttctatggctggaaatttgaaagcagcttagctgagtggttctggctcagggactctcaggacgttgtagtcaagatgctggctgggcctgtaattgtctgaaggtttgggaattggcttccaaaatggctcactcatgtggctattggcaggaggcctcggttcctcaccgtgtgggcctctccttaagctacttatgacatagccactggctttctccacaagtgatgacagagagtgagagcaaggagaaagctgtgatgtcttttgtggcttgatcagatgctgttcacattggccatattccgttcattagaagggactcatttcagcccacgctcaactggagtggaattagttttcaccatttagaaaaaggattgtcaaagtatttgtggatatattttaaaaccaccatatcataagttgtttagttctgaaaccttggttctggttttaaatgccttgttttggaaccttttctgtgcatttcaaacttgccttgaaattttctggtttcagtctttgactcccttctgcctatacccttgatcacggagcaagatatatcgctcacttgtctgrccttgaatagccataaactgatacttaatggccaggctgtgtggagctgatgtgtgtgtgtgtgtgcatgtgtgcatgtgaacatgggcatctaaatagaggagaagaagaaataaggcaggagtttatggatgtaaatggaggtggatcctccttgtgagtgcagttagtcctttttctaaaacagtgacatgaataccattttattgtcctttttcagtccatcaaattatgattaattaattccatcattcaaattacatttataaggaatgtgacaatgttctcctcactttttggaaatttatagcttatatcgacaaaacagattttttaagaggatagtttgtactgaatctttaaagatgagaaaagatagtcaagtggagaagagtgaaagagggaatagaggaatagttttagtcagaataatttctctggtttggcagggctgtgttcctttatgggggctctggggtatgagccgttttgttgctttttccaccttcttgaggccgtctgcattccttggctcatggctttcttcattcctctttaaagccagcaacrctgcatctctttgatcttgtttctgtcatcacatctctctctctcactgaccaagactgggaaaagtcctgtgcttctaacggcttctatgattagattgggcccacctggataatttatgataatcttcccgtctcactatgtatggccatcatcaacatctgcaaaggtaacatattcacaggttctggggattaggccatcaaaatctttatgggatcattattctttgtttctacttttacactttstgggaaaaatgaatactcataccttgaaatctattttactaggccaacaaatttgtaggatgagtaagttttctttaggagcttgcattccttaggataattccaatactcttggccttgggttgcttgagctccaacagctaaaaacacttccatctagtagagaacattaggccattaatcatgtttcaccatctctttttctctccctctctcttttattgtcctttccctgaaatgtacctgcttttttgcaaaagccaatttaagctaccaggcattctttaaatggctaaaggatcctaggtaccatgaggtagggacagggggaaaaaaagaggtggtagtttcttcaagaaagtcacagtctagtaccccaaaatacaaaaaacccagagtcagtattattttttatttatatacatgagtagttatgtagaagaaatggatttagctgaacattcaccatgtgtgagtgagttctgagttcagtgttggaggctgggcttcaggatagggggcaggagctagaagagatggtcttctctatataggtcatggctaggaaggatcaagtgtccttccaaggaggccaacctacctgcagtcttatgatgactttgaaagtttaaaagaaagtgtaaacttgcaaaggacttaacataaatgctttaaatgcagtgaagaatttgggatggagtaggggtgggtgtttgcctcaccatggttttgactgattcactcatttctcttttcttgatattgcttgagctcccaccccaamtcactctgactttctgtctctcatgacccttccagttccaaattttcccaattctataggctgcccgtttacttcgaatagtgttttgcagaccaaagagaaatttggaaggatttttctgtatgatgtggagagtatggaggaggataacctcacacagtgtgaggaggctaagggagattgttcctgaaatgatactaaaactgctattgacttcaagagccacataccatccatcagttaaaaacaaagtgaatagaaaattgccagaagatagtcttgaaaaaaaamcccacagattccaaccagccaatttcaaagtaagccctggaataaataacctgttggataccatgcatgttaatgaacctcaaaccatatactgaaactagaaggcaaatttaatgacccacttgcagaaacaaaaatattaagagctcaggtcttactggcagggataaaaagtctatggcagggggataatggtagctagcaaggccagatgagaaatagaggtattattagctgatttcctcaaagttgttcacattaagtcttctgaagaagtagaggaaaatgagcaatgagatgcaccaaaggagaaaaatctatagagaggacaaatggaaagccatggaaatcactatttatgcagaacaatgagacaggccatattactctttgactctaggtgagatttatattattaatgactctttttctatagtgcctgcttttccttatttagtgaatttaagcacttatgaaaaagagagtcatgcctagtgaaagcagacatgtaataactttctgtgatgtgctatcgacaaatccatctaaagaagaaaaccacctccactaggactaatcggcaccgccaaactctttgtccaaagcagcttttgaacttcttggtctgattttccgaggtactagactatattgcctatggctcttctatctccttgctatatttctatagaatatttattttgacattttaataatgctcagttttgagaataaagctatctctgctatttaatgtgggcaatggtttctatgccctgagaaccatttaaatgaactcttttgtatctgaagaaattgatgacaatgcttagaaaacatatttcaaatgcattgttatacatgtaaataatttgccctctggtggataataaataagaccactggttgtggcagcattactctgtttcatactcatcatagctgtccgaggtctgtgtgtgatagatatgcaaaaatattcccaataaagactgcttagagtgtgttatagttttgagacctgctatttaccactgtagcactagtggaagtgaatttaatagattagtgtgtatgttaggagttgtaaacttaaatgttacttcattggccagctaggtagcacacgtgtgaaatagcctgatataagataataaggagtatcagagcatgtggacaactggagaatgtatatattatgctaaagggcttcaaattccaaaactaaaagaaaacaaaaggttctttggctgcaagtgatgtctgcaaaaagctgaaacagaactacaaggctctcaattctctgtccttatatctaaaattaaattctaccttagactatactatccttgagggacaagcccatgctagattcttctttatatcacattgtacattctcaattacagttttctggacagcacaatatttttcctaagaaaagacagctattacagtgttcagtagagataagtatcttattgtggttgagaggtgacttgcctttgagtcataactttaaacctgttacaaacacgactctcatacatatgcattgaacatgtgtcaaagatttatttaaaacccattaatgagggagggaaaagcaggatggtaaatctagttcaaagaagaatttgagggaccaagaatatatagtcactgaaggaaagaatcctgaaataagatgcaaaatggttaatgttctacagggcaataaaaccataaccttgaggttatcttttctactgggcagaaattatttgcatgtcttgtggacaaaataatttgcaatttgtcagtcttcacaaattaacattgaactttacagtctgtggaccctaatcaataataaataggaagtcagacaaagattatatccccttgatcagtgcttctcaaaatgtgatgtatacgaagtaacctgaggatcatgttaaaatgcagattctgatggagtgggtctagagtgaggcctgagacttggcattyctgacagatctcacatsatgctgctgctgcaggttcaaggaccacatttcagtagcaggaatggtgggtggcattttagacatgcagatccattagacaataggagagtatgtctttcgaaaggcacatagtaatctttcatccttatttccatattttgcctgcttttctaacaactggatgaacaggatatcaccagataaatatcatgcagtatgagatgagtgtatttatgacttattcaagccctgaaaacagacctttcatctatgagagccatgtcattgcttctgttttgtgtctctgctctcatcctcttctgtctgctgtttttccatatgacttacattatttatttttatacaaatacacaaacagaaatttactgatcagatgaatttaggaaatagtccctgaaatatattgatttctcttcccccaaatgttagaaaatgtaaaggggcatctttcgtcaaacagtacatcccatcctatgatgcagatggcttcaattcagtctattcatttctcatatcataaaggcatttgaaacagacaaagctgtgcatcatctgtgggggaagcaatcagtgtgaatacaccacagatgtttccaaagcagaataaatcggcctctggcccagttggaatttttcctccacaagagttttaggtgatccattctgttctgtcaaccctgaatcatgtttaccttcactytctgattgaaagatttgttactggatctcagtaatgctgatgagagaagagtcttggctaagggtaatgagggagtaaggagtctttcccagaaccggttcctggaatgttagccttatgaaatggcattatgagttctgtaaaaggagggacccatgggcaaatgtatttggacaacactagcttaaataaacagctttgtgttctttttttttttttttgagacrgagttctctctcgttgcccaggccaaagtgcaatggcgtgatctcagctcactgtaacctccgcctcccaggttcaggtgattctcctgcctcagccccccgggtagatgggattacaggcatgtgcccggctaatttttgtatttttagtagagatggagttttgccatgttggccaggctggtctcgaactcctaacctcaggtgatccatccacctcggcctcccaaagtgctgggattacaaacttcttagaaacataatatgtggagtgaatctccaaaagtgataaaaagttatttttctaaacttaccatatctcctccatttgaaggtgccattggttgtaaaccattttgttaatttaatagtggcttttttttttagagggaaaagattcagctagctaaatttttgatattgtaagatgaagctccattttggaaatgttaaagtataaaaaaagtgaacttgggaattgttggtcaaagggtacaaagttttagatagatagaaggaataggttttgaggtctattgcacagaagggtgactatagtcaataataatgtctatttcaaaataactaagagagtaactttcaaaagtctcaccataaaaataataggtaggtaagtgagataaatggacaggttaattaacttgatttaatcatgcatgtcacatacaaataccaaaacatcacattgcatcccataaatatatacaaccatgatttgtcaatcaaaaataatattagaaaaagataaatgccatgcaaagagggtctggctgttcatactcccaggcgagaaagaaagggtggccagtgcttacagttataagcagaatcacaggtgtcactggatgagggagggggagagagacagagacagagagagacagaaagggaagagaaagagacagcaagagacagacagagaaaatgagaatacactgtagtaatcgtaaattagaaattggttttttatctgaccaggaaaagggtggaagaaccgtggctacatctgagctctgataatggcaaggttagaacgctaaacatttagatactgattgctatggagtgcacttgacaagtaatacaaatcttagaaacaaaacaaaacacaaaaaggaagaaaatacattatacggtcacagtggtctctttttaggaaatgcatattagcatgccaagcttttagaattccaagaaacacattttaggagatataaatctagaatgttttttgaaagggcraaattcattgtgaacatgaccagaccatcacctattttattttactttttttttttttgcaggaaagaagtgtcaggaaattaataatacagggttctgtttgtactttccttgattaaaacaaataatttatttgttccaagtaaaagaatttgcattgattggggcttttggtggtcatgaatcacrtgtatttgaattttcaggataaccagtactttctcatgctgagagttgtaatgaaatgtacagtcagtcttaaactaataatcaactataatttatgttagaagtgtaattataaaggtaaccttagtttataaattgctaattaatattttcctccctgctgaggatattagcttgtttcctggtccctcttgtctttgcctacctggctggggatggggaatctttggatgctgaaagacttatgcacagctgtagttctttctgaacatggatgacattaaaaatgaccactttagtatctctacagaaagsttgaaataagcctcaggcttatttattccatgtagagtctttgaactatttcagctgtttggatcattttatacaaagctgacaaagggctggggggaatgcacttttatacattcttaattgagatgtttgtgtggatgatcagtttctgtgttatttttaagagtaacttaattaaaagttaataatatctattccaagtcattactttcacttttatgtctgctgtacatatagaagagtagtagcatcttgcaagaagtgctcaaattctttaactagtcacatagaccttaacttctgtcctttttcactattttcaccactaccttatcttggtcttcctttttctacctgggtgctcygaggctacactttctgctgactaattctctcctgagaactttgatattgtagcccaggctgttttgttctactcatatgtgcatgtttcctttatgatatttgttgttgccattatgaggtgtttgccatctatttatattatgatgagaacaccacagtcatctggaattggaaaacaaacaggagctctgcattgcccactatgttcagaaacaaatacatttgcaatctggaatagttatatatttttgcaactcaaatctttctttgttatttagaactgtatgctagggctctcagagagccatcatataattgcagatgagaaacaaagcaacacaatcctattttagatatttggaaactcataaagatagaactaccttggtaactctttattctctgttcatgtgctgagttgrgtgctgaacccaccatgctttgcacacacttcattttatccatgcagaagcaccatagtcaacagctgggatctctcagcactcatcccagctcaatgaagatgctattygggatgtttgatgtacagtatgtggtgtggtgcaatgtggtgaaaagaatctgaacttgaagttagcacagctgggtttgagtgttagatttgttacttcctaaacttgtgctcagcttaggcacaaagaaacaaattatattacctctttttgtctcaaatgtcatctttcaattgaagatattcttctactgcccaatgttgaataaagagtaaaggagayggcatactttaatgatgtacatatgrcattatctaygtcatacccaggtctggaaatacttcttctcatcattacctaaaaaattctaactgcaccaaaggaggtgtgttattggatatctaattttaaagtcattttaagtcccccaattctctagtttttcccataattcaaaagtcctgatattgcggacttcttactttttcttctcaaagtaagctagaatacattcattaagcacagaagatttctgcagtcattttaatttccataaagatgtataaaagaaagggttttctggtttaactacaatggagtaggctctcaaaatcttagacttgtattaacagaaatatctgtggtgtaattccatttctagcaaaagcagaaagaagatggttgggacttttttatgagctagaatagcagaggtaatgttatatcaaactatagggatttaattaccccattccacaaatgtagttttcaaataaaggagtcaaaaggatttctaaagctattcttctgaactgtgatataaaaacccagaatacatttagtagatgtaaaatgtattactgtacattaggagccaccacaatgaatggtatcacaataagaaacacgacatgagattgaacacacagtgattagaaatctcttggctgtcttcttagaaatattgcaatttgcttagagttttatatgcttgccactgtaaggatgggcatttctggactgtttctgatgggtgaatttcacactggggaaacgtctcctagaaaatggaaatgctgtcatttgagggcttaaatccagactaggggtaagtaagaaatgctgttaggtttgggaggagtaaatcaccttgtgaggggggtgctcatcatttttttcaggatctgaaagtctgtcctttagaacgtccataaaaaatcatctcttcagcaatgaagaggaggctaatgcagggtgactcagggacttctttactgagggggctttaaagtctttacaaaaacctcttttcctctttcttattaaaaagataacatatatttattgtagaaaaaatttaaaacatagataaggaaggaaaataaagatcatctgcactatcacagcagcaataaacactcttaacattttggcatatagtcttctagcttttctgaaaagtcattttgccaagtcaaataagaacttagtaaatggaagttctggcattggaaaaaggagcatcgaggtttgcatccatttatcaaacacttgtgctgtcaggaaagtctttatcttttatatctacasaggaaagaataaattgggtatattctakaaatagggggtttgtaactytcaatcaactaagttccgaagtgtkttakagaacattagctgtggctgataagttttgtttgcttttccttctttgtkttgagaaaaaattgagcacataccactttttaattaaagaattgttttccacacatatttcctcaatcttcaaatwttcctttagttctgtccccattagtgagagctattttcatccagtctaatcaatactcgcccctttcattgttctcattttgagtttagatcataaacatacatctgtcagtagcaaaagtattctaaagctccccctctgcacttggtcgcagatactcatactgttagggtgtaaaagggaaactggaatccataaaacagggtgaactctactatatatgacactatgcggttttcctgagctgtgcagcacagggacctgctagtaaggcagtatagtatagtgggtaattcagagtgcaggttttggggttaacttacctgggtttatacccaggctctgtcacttactggctggatgaggttaaagagaagattattcataacacttgttaaagaatggtaaggaagactttatgcaggactatcataataggtgcagaaaccactgcaatggggttttgcagtaggggagagagattgggttcaactcctgatacaacaaagaaaagtaagaatttatagccaaggaacagggttggggaggtggtggtcagtgcatggagagttactaagaggaaacctcaggggcaagggaggattctggctgaactgtcctaacaggactcttgtggaaggcaggccaggatgattcagacatcatctggggaaaggtaggggatgaggaatctgatcagatactgagggtgatcaaatatcaagggtgattccagtcagatattgagggtgatcagatgtcaagggtgaggaattctggctaaattaaacaatttagcaggattcttgctaacattggacaatgtagacatgagcacagaaacaccaaagtcaaggtgtcgctggaaaaatggttcagaggaacctgattagaatttggttaagattaagatctttgtcagtaactttgcacaagttacttaacctctctgtgccccagttttgtcatctttaaaatgaggctaatgatactatacaatcttgtagagctgttgtgagaattgatgaaataatgcattgtgaagctgcttagcacagtgctaagcgttcaaaaaatgccagctagcatgtttcacatgactatactctcagacttctgggtggccatatcagaaagcactcatgtccaggaaaggcccctggagagtttcttactttcttctgtgaccttgggtaatcctctaactttcaacaactcacgttyccccttctgaagtgcagactatgcagtttatattacaaaatggttttagatggagatagcatgctactttgcaatgtaaagtgttttaaccataaataatagaggtaaggcctcccctaagagatgtcgagcttctccttggagatggaggaggcttcccctgagtgaatagcacacctcccccgagcatagagaaaggcaagtcacaggaaacagcttggggaaaacaaatgaaaaaatattgtttgtgccagtgagggcctgtgaaagatgaattcctgactaaacttgttaagcagattaggagtgatgctgttcataaatacatgcagccttccctgaataactaaataaagcaataaatttggggtttcaaatcttggctgctcctccttatgagttcatgcttcttagaactccagccaggtgttcgcagtttggatgtaagatggcttcattaacatacaagtatgcaaagaagccattggaagagttctgaaagatgttgtttgctctagttttgatgtgttttggatatctcttcatgttggtacacaggggtcctatgttagtgtctaactagcaaagtttaaaagttctctgtaataaaacaaggggatgtaccttaaaatgacatgctttagaaacatttaattgtttagctctcacaaaaactttttttttttggctgttcactttttcctctttcaaatctaattaaagagtcttagttcttccaagaaaaaagccaacggtataataggcaaggtaagggcattggattttgcttctttggaaagatgttctagcaaaggcacactcttattgtattcctactaaatatcttttccacagcgctgatagagtcagttatggcccattcatttattcattaagtaatatttactgagcaactactatgtgtcaggacttagttaattcaattgttaaacactagtcctacttttggggagcttgcagtctaccgagggatatagataagtgaacagggactttatagcttgtgaaggcaaagatagaagaaggcgggcactcacatcaggttcaaggagcaagatggctgatcaaaggtggcttcctgaggggaggcttctctcagcagtcaaattggtaaattttaatttgctgttacatatgcttactggtagaatagatgttaatacttcaggaaacttttgcatctaatgggctatctctaccttggaaaactccttagattgagattcagaaaccgttgacctgtaattaagcccatgcttgcctaatcagaatgtaatttctttgcagaatcagaatcctgagatgggatgagtyagccacacagataatgctgttccttattgtcccagggcagggaatcttaacctgagttatagctcttacgtttatttagcatctgacatatgttcattcatgtgagtctcacaatggcacttcaagggaggcaggactcatattgtcccttaacacagtcctggtattcattcacatgatgctgcacacacattcggtgcttaatacaattttggtgaggaaaggaatccccattttataggtgaataaagggaggctcagacaaattaaatgttgtgtgtaagaccataatgcagaataatggcagggactgagccattagttttctgagtcctgggtccagtctagcaaactacttctcaggagtttagggtgttagggtaagttgtgaccaagtgagacagcagaagcccttgttcattgtcctggagagccaatttgttgctacaaagtggatttcagggtctttaaatcatgcaatcctctaaaaaagggattacaaagcagcatcttctggtctggctaatatctgagcagtgtgcatgtgtgtgtgtgtgtatgcctgcatcttgcttatagtgtaaaaaattacctatatttacacatcagaggatatcacatgacatccagattcttagyttctctcaaamacaaamacagamacaaaaacaaaaccagcttctstggcagtcagattgctttataccagtggccaattgatcagagctgagttgctgttgttcccttagatggggttcatgatcctcccctggaaagtggaacttcatcttcaatcacctgcctgtcctgcctctactgattgattaggggaagggaaagagaagagagggattgtcattctaagcttgggattgtcattctggctaccagctctcttggtagccaaagccagagagtaagttggcaaaataacttaccatgagacactagaaatatttcaagtcatcatcctttattgtctcatgaattttcactatcctttaccaaattaattttgtgtccatcaaataatgcaaacataagtagaatgctgtaatattacatagtattttgttttgtgctttgtaatatggctttttaatagagacacaacttactatatttctaaactagcctcattgattgtaatctcagctctcttgagcagtgctagttggagtgccatttccaaatggtgagactaagaaaactagtcttccttttgtgacttgtttgtagtgtgtgttcttcattggctttcaacagtcctgtgttatgtttcttaggatatccaggagtcacaaaggaaatgaaggcacctgccccagggcaggacatggcagaatggctgcaggaaagctagacagacccctgtcttttctggcacacaccaagctcaactatcaagaacacgatgtaaacatcaattctgggggcctgtaatgttcagtcactctggggacagaaggaagatagtgtggtatggtaaaaacagcacagtctttgggggttaggcacacttgattccaatctacttctattgcccttaaatttgcagaagttactcaagctccatgtcagtttccccatgtttgaaatgggggatttagcactggcaaataataaaacttcaataagtagtagttattttattttctccattttacacacagggaacctaaaactcagaatggttagataacgtctccaaggtcaagtaaatggcagagcatgcccttgaaccttggtctctcactccaaagtcaatgctcaaactaccacattacatcactttcgtaatgtctgcctctcagggttgttgtgaacatgatgtaaagtgcttaacagtgtgtctggtggagtgcaggcttcagtaactggcagtgattattatgagagataggtgagctcaactgagcttaaatgccttctagaagttcaattactaaaagaccctcaatgtgacggggaccccagctcaaaggtatatcttttcagccccatttacacatatagatgcttggtgtcatctctgagtatgagagatgatgatgctagtggtgatggttagtgactagaaaagaaacatgacttcattaataaaaacttaaaatagaagactgctcagtgcaatggagtggcaagaatgactctccctgccaaacatacctttctcgtcagttttcagacaygaaatcatcttccaggattctctgtcttgcctggaaagaaataggcgagaaagtgcaagctccttagacctaatgtctaggagggtgttgcttttagtaatgcaggaataaaaataaaatgaccctctaaaaggcagtggtgactacccacagctcatgtgggagtcagtaaaaacctcatttttcatactagcattcgagagctgacctttaaaatcaccacatctggggagaatgtgtgatttgatgcagaacattttagggcatgccaaaggatgaatggctgagagtgcgctcatcagttttcttctgtttcaaggagctcagaattgcttagattataaaaatcagttcctgggcactgccaaagctatagcatttgcataagcaggtcttctgtgcaaagtagattaagcacatatataaatggaatgctgatccatgcacctgatatgaaaatgatgtgtacctgtgtgtgtgtgtccatgtcctcacagtgaagtttagctatttcaaggtagctagttatgtaagttcagcaaagggtcatttggaaaaagatagaactgctttaaaagaagagccaaactctgtcaattgctttgttatggagatgttgcactgaggctcatgcactatttctaaggtccaatgagtgagactgctgaatataaaactagyttttgatttgtgaaaggcaaaatacctgcaggtccagaaggaataaaatatgcctgtttgtattaataaaaccaatttttaaagagccatggaattttgtaaaaaatagaattggatggatggacatctcacagattcatctccaagaaaaaatagcatctctctgatcttgtgtttcatcatctgctaaatgaaggtctgggcagtgatgctgatagaaattccctgtagctgctaattctgagcaggttgggctgtgaggcactttggagcttggatctgttacaaactcgtccattctctagcattttccctggcaagtctccagttggctacaaccttcaaaagcagcaaactgaaaaactttccccctgacatttttggatgagaatccagatgtcagaatcaatgggtcttcagagttgctacttgtaatgaaggagaccagagaccacttaactacaaaactgctgcctaacttctataggagctacctgccaaccaaccttcatccatgctccaaaaggcctgtggtgtcttagggcctgactgtggcaaggaggctggttccacccttcctcactgacttggggaccactggctattgcttaaagggagtagagagagaggtcaaagagcagacctatttctaaacctataagtgaaaaccactttgatggctactgtagacttttacaaagtctgtaatactggaaaattggctgaggttagtaatgactcactcagaaggctgacattgactctgttggtatggcctgcagggcaactcttcttgcttatctatttcctccctccttctcttcctttctttctaccttaactatttgctgagtaccttccgcatgtcaggcaggatgatagagagcaggaattcaacaacaacaacaacaacaacaataacaacaacaacaacaaaagtcagaccctcttcctgattccaggaagctcagggtctggtggagaggacaggcaggaagactggcagtttctgtgtggattcgtatgggctacactggggaagggaggagggccacctaacctgccagatggacacgaatcagacgaaggggctcggcaatgacaagagcattccaagcagagagaacacagtgtgcaaaggcccaggtggaatctgcaaagagcaggatcagtctgtgcaattgccactagttccccatggggtggacaattgggaggaagacggtggagcaatgaaggttgagagaaagcgatggctagaccatggagggccttttctgccacataaagaagtttggacttttactctagagcaatgagaccatgaaggtttgtcattgggctaccagatggttgtcatgacctaccattgagtcttggagatgggagtatcttagatggatcttgccagagttttaagtgtgggccaactccttgggtggcaccaatgtcagatgaatgcatgacattccygttagtccttaagtgaaaggaagagattggggtatatttcttttttcttctttttttttattttggaaaataccattaaaggctggtataggaagtagtgttaaataagaagtcaggtggccttctttgcagttgaaaatgctcccagataagctgaggaaggggcaataaaactgaaatggccagagtacacttaaacacaatcacccatttattcttgaaagcaacccaaaagatataggaaacaatagttaagaaacacacagaaaaattcagactaaaacagtgctgctgaaaatcrcctatgtcgacatattcttcaataaaagttgttttctgctgacactttttttttcttccacggatgtccctcttatatttgatgatcaattttccacaaggtttgccataatgtttcctcagagtttaggtttttacattttaattcattcgatggctgttcttaacctaagacaatgtatgctgttttcacaattcagtgtcatctttttctagctgacaagatgtttctcaaatcccaactcttctcttttctccacatgtttttccctctcttgctttgaggagaatcactggtaaaagaggccatctctgccggtctcagtgtagcctgtgatctggtacattctgtaatttgactgacctccaccttcctatgatgtgccttttgggttccctgaaatcacccccatccctcccaatacctcaggccagtgtcctagaccatttactttttccaataacttctcttcttgcagtccttctaagatcccatttctccttcaaaatttgacacaagcttcatattattcacatcctgagacagataagcaaagatgaattcaagattgaatgagatgtttgtggtaggagtaaaaacaggagagatttattattatcattagtctctctgtatccctatcatgcctttcttgagcagagagaccatctctttagctacctttgtcatctcaactagagcttagcacagtggaatttagtacatttaatttaaaaaatgtgatttgatgaagttgtgacctactgatcgctatggaccagccctaatgtcttccagctctaagtttctagcattttttacactctagctggggtaggtggtaaaggggtgagagtgggaggggactctgaggggtcttcacctttccaacagctttgctatgaaacccagtgaatggtgggtttcgttgagaggctcgaagagagtatatggtaaaatatgagaatagaaatctaggtgtagctgcagtcgtgaaaggcatttggaccagtggtacttggaatttatatgatgactgcctcccaaatctgtgaatgcttgattagtggcttcctattgccaaagggaggcttcaagatgtgacatgagtggcttgtgattacagagcagctgcagccccaggattgcacagaaccatgttagtgaggactagaactctggaccagccctaacatcttccatctcgaagtttctagcatttttaccctcttaatttacattttacataggactagcccagggcaaaataataaagcatgcaaaaacctattttctgctatctcttgaagcctagtcccagaattttttttttctttttttctttttttttttttgagaaggagtcccactccctcacccaggctggagtgcagtggagtgatctcggctcactgcaacctccgcctccctgtttcaagtgattctcctgcctcagcctccagagtagctgggattacaggcgcccgtccccatgcccagctaatttttgtatttttagtagagatggggtttcgccatgttggccaggctggtctcaaactcctgacctcaggtgatctacccgccttggcctcccgaagtgctgggattacaggcgtgaaccaccgtgcccggcccagaaaaatttttaactcaagaatgcttgccctgcaaaacaaagcattggggtagttgttgatgccttagtgtgatttggctttatgtgtgattcttaggagtatttggagtttaaatgattgaagaaacaacaaaaattgatgtctggtgggaggtttggatgaacgatgttgggatagatatttcagaggcagtgggacctccatagtttaagcaatgcagcctctgttttcacttttggttcccaacgttgatttttattgccttaaaacctctattccaaagctttttgtttagctatgaagcctcattcttatttcagtactattgtcatttgcaatttaatcaagattaaggaatcttggctaaaggtgggaaaacacttgctgcttgtaaactgacattttgatatagcaaaattccaactctagtagctagggtaggtggtaaaggggtaagtgggagcagaccttgaggggcctttacctttcaacaactttgtaagtgtatacattgacatactagttgtcttctcaaaaactagatggaaaaatgttagtaaaaacactgtgaaaggaaggctgtgagccacagagcccttttatgtggttttttttttggttgttttttttttttttttttttttgagatggagtctcactctgtcacccaggctggagtgcagtggtgcgatcttggttcactgcaagctctgccttccgggttcacgccattctcctgtctcagcctcctcagtagctgggactacaggtgcccaccaccacgcccagctaattttttgtatttttagtagagacggggtttcaccgtgttagccaggatggtctcgatctcctgacctcgtgatccacccgcgtcggtctcccaaagtgctgggattacagacgtgagccaccgcgcccggctttatgtgtttttatctgcacttaaccaaagctacagccgctgatgttagaacatctttgagtgacagtcttcttttctgagatttatctttttgttatgacttgggcccctaacagcacagatgcttgctagacttgcatctgaaaggaccctggaattcccagctttatagacattgagcctttatttgctagatcatgaagaagtggcagtggtggggagggtgcgggggatgaaacctagaaagagatggggcagtgtcagtggctggggtcatggggagcataaggtgatagctacttacactcatcctggaaatatttcagtatttcaacaacaggaatggctgtgccagtgtgactgactgatagtggccttgtaycyataagtgcagttactgataagaaaagaatgctggatttgtagatgggaaacttgtgcatgattcctagctctggcaaccactagttttggaaccgggcaaaccacttgaactttgagtctcagtattcccatctataaaatggaaataataagtgctctatctacttcacaatgggcagtaagataacatatgtgagaacactttattaaatgaggaagccttcttctggttgagtttwcctattattttcatatttctatataattgatgaattatacagttctttagtgataacrtcaatatggagcgtttatttactcaaacaccaaatattgtattgatgaactttttgggttgggctgctttttggacatatttttcttgttccccttctaagtgagggtgtgggtttggaagctacgtaactaagctttgttagaactgtgtacaagataaagataactagggtctgaggacctgagggagtatcttataagtgaagtacaccmaatttagcctataactttttgttatgtttggcacatctcaaaccaatctcaaatccatcttaaaagggcccttttaagttctctttgataacttcttgcttcctgcctatgtgctagatatatagttaatggaattctagatgtggaatgatgtatgtgattattttaaaatatatgctaccaatatgcaagatcaaatttttagggaaggcgatagggaaaatatatcactcagtcacttcctcacttgcttactcaggaatttatttcttaaatgatgtgtgtaagccaatatcctggaggaagtgaaagaagtaggcaactcgggcttcctcctagaagtttatatgtatcattttaatctaatttatgaacattcaaggaccctcaggaagaggctatgtaattatttcaaggagggatgcagagggagtgagaggagggaggcaaaarggcccttcagtagggaaatgggaatagtaaatttctttcccatcaagtgttctttgacaaagtcatacatctctttaattgtgaccttagcaagaacttcaggtgcctaatgccaaacataagaagggttttgcatagagtgcttttataaatcaccaggtggcaccattacatattttattggtgtgattctgtgtctgtggacttggtcccttcaagcttttgccactgcccatttggctaggcccgaactgctgcgagaatggtgtactaccagtagtgatctgaagatggcagcattgggcgacctatctcattttcctaagcacactcactgcagctcgggtcgacagcgtgtttggatttcagattgtcactcagactttcttctgcttaatgactgcatgtatgtaaatgcctctgctattcttccataaaagaggtctgagctatcatttctgttttgktttttaatgattatatgtaattatatccaaataaaatatttataaataattacatgtcattaayagtatgtaaaatttggaattcatgaacaccagctttgatgaaagatacccttcaatttgggaggtgttagtcttagtattattatttgtttctgtttaaaagacattagtggccaagaatctgcaattttcttttacaggtgttcttacaagtctcagcatatttttatttttttgttttcttgataataggyaggattattcatttggtaaatctctagggaatatattatagatccacatctggagaattatctgaggaaaccaaattatattttcttaaacgttcatgaagcaattagttatcctcaacttctgaagggtcttcaaggggtcatcgagtgcaactctaagtaggctttgcatttaaaaccagactgtagcaatcaatgtgtggttgccctctcctcttgattagtgatcatgccctatgcattctgaggtcttcaccagtattgaaaacagaaagagaaaaattatcctgagcaagtttgtgattcaaattttgctaataacttaatttcagatgcaacttaccatttctctttatctcttaacaacacatggagctgcaaatagaaaactgtctcagactaaaaggtctaattctctaaacagaatgggctgtagaaacagcatttagggaccttccttggttgaggacagcaggaaaccaaagggaaaggtagatagggaatgagcagatggcactatgtaaggccagagtttctggaaggactcccagatgaggtmtggggccagagagcattctaagtgatgggaaggaagagcacaggggctcttttcctctgaggttgctctgattctagaagcacattaaccaaagacacactgggtgagagatttatctttgaatctttagttgtattgatgcagacctaccttttaattcctaccttaaactaggatggtttgccaaatctrtgtgaagactgtgtctatggcacaccagattttttcagaggctctcttagcgtgttttggttcagatcataaatgtgaccatgaattatgtatgcattgattcagcataaaaaaattaaacatgtgcttaataggctgacccaaackctcctgtagctggctctgaacgtgtattttggatgcttttgaatttgatagcacattttttccacgagctcttmtatattcaatgttaaggctccaaggatttcgtgtcaggtgttgtaagtgcaayataaattaggaaaatcagccaaaggcacactaagaagatactgtgacattctagttttcctccattttagacttttakttctccattatttggttgtgaaggaaaattatgcatctattaattttttatctagaaactttaaaatgtgacagatgttgatgtcaagctccttaaaatcctgagctctagatctcttaaatgtcaccrtctagactgctcctgggtaaatcacttcatcttcctcaacttgaattttccttttggtaaaataggagagctgaacatcccagatacttccaagcctttgtgctttattctatgactgtatgattacttcccttcattgcacccagaattatgcaaattttttagaggatatacttggaggctgtattttagcttttcaacatgtatttacattatttatcttggttcttctcctaagggctctgcgatatttacttctcccaaccccctgccatccctagcccaagtcatactcgtgttcactcacyactcttgtgtgccactgccatctagctggtctgtttccactcacttttgctcccctacaatctattttccatgcagtacctccatgaccttttgaaagctaagttagtacatatctttctcctgcctaaaaccctccagcaacttcccattgctcttggaaataaaaatctattcctgcctcagggtctttgcacttgctgtccccccttctaggaacatcattttctctatatccttgcacagctgcctttttaatttcttaatgaaaagctgcttttaaagctgtttgcagcttaaacaataccccttcactgaagctgtctctgaccctttttctaaaatagtcacattccctgcttaatatttgacatattatatggttttgttatacatagaatgtattccacctgacattatctggctattgattttagtttttgttattgcctgtctcatcccagtagcatatatgcttcatgggatcacaggctttgttgccttgttcattgcatatccttagcatctagggcagagtctggcatgtaatagttgctcaagaagtatttgtagaataggtgaatgaatgagtggatggatgtcacagaatagatgaatgaatggatggatcgatgtcacaggcaggaaaactacaaccccggggttggagtcacatagctaatgagaagcagggctcagactagaacttggatccctttgtgtgtttctttcttccaggtcattctgccacatgccagcttaacttagagatcattaattcatttacygtttatttattaatccagtgcttattrrgctcttgttatctttcagacaatagtctagatcagttgttctcaaccaaggatgatgttgctcttctgggaacatttgccaatgtctgaagacatttttggttgttacaaagggggtgggagtgctactggcacctagttagtagaggctagagatgctgctaaacatcctaccatgtacaggacagactcccacaattatgtagcctaaaatgtcaatagtgctgactttggaaaaccttgtcctaaatgaacagacacctgcttttttggagtttatagtctagtgttgggggatagatgataagcagcacatatcatgcatatggaaattgcagtctatgtaaagaagtgtttcatagaaagaatgaaaagatggaacagagtaaggaggagtggtagtaagtgctgtaggttgtgatggagggtaggaagggctgttattttattttattttatttttgagacggagttttgctcttgttgcccaggctggagtgtaatggcacgaactcagctcactgcaacttccgtctcctgggttcaaatgattctcttgcctcagtctcctgggtagctaggattacaggtgcaccaccacgcccagctaatttttgtatttttagtagagatggggtttcaccatattggccaggctggtcttgaactcctgaccttaggtgatctgatccctttggcctcccaaagtgctgggattacaggtgtgagtcaccacgcccagtctagggctgtaattttagcctctttgggaggtgaatcaggaaaaaaaattttacttctggaggttaagctccatgacctggaaatgatcagtcctttgggtccagctcagtgctgcagagctttggaaaattcaacttcagagatcaccctcacatcaaaaaaatatataaccttcctgaaccaagggacatcttagcctccaaataaaaatagagcaaactgacacgtgctggaaataattattattttctgccccttttcaggagtgtttaaattcctttcttaacaccttcagtgctctatcatcattaatgcaggacagtgctaatttgatggaatttttattgcttgttgtcagcatctcacttttctttcagagcaaaaatagtgcgagttcagcctctctcaacagcactgtgagttttttgtttttctttttttttcttctcgttgtgcaaagattcctccgtctgtttaggttgatttcttaaacccaacagaagcaattgaagatattaatgtcctggggaagttgtagtagttgatgctgataaaacttgggccaataaagtgtgtgtgtgtgtgtgtgtgtgtgtgtgtgtgtgtgtgtatgtgtgtataacatccgccccactgctttccaatttatattagatcaacttacagtttttttttttracttcatgatggtgtgaaagtgatatgcattcagtagaaaacacacttcaaatttggaatttcgatcttttcaacactttattatgaaataggctttgtgttagatgattttgctcaactgtagactaatgtaagtgttctgagcactgttaaggtaggctaggctaagctaggatgttcagcaggttagatgtattaaacrcattttcaacttaggatattattttcaacttattgggtttattgaaatgtaaacctattgtaagtcgagcagcatgtacatacacaaatacatatataaacctacatgtgcatatacatatgcaaacatagatatatatttaagattttactaaaaaagtatattaatattgtggttttggtaatttggtagtcatatagaggtacttgctttcttggttgctctcttgtttctttaccacaattctttaccaagcactggcaccaatgaatatttgttgaataaataaacaaactgccaaaaacagttagcgattactggattccaacttatttttccacatttgcataaactgatttatgtcactgaaacaaaatttggtaaatatatagcatattgttacggaggtatcattgtgatatawttattcatttctacatctgtgttttttgtttttaaaatgattgcaggggatataatttgactcatagggcttctgaattcaggaagcgtaagactcttagtagttaatacttttttcatatacrttcaacctagggagagaatactgagcaagagaatagatttcaataaatgttcttgatttaaatgtatttaaattgataatattgaagaaattatgcacagcccaccattttgttttgggtgccatttaatcctatcaaataactcattgaccagttcactgaatatgtgttcgtttttcttcagtgctatttcttcacaatcgagtttggcctttgcaagcaagaagggcaactgcgggcwtatggagcaggactcctttcctccattggagaattaaaggtatgaagctgtgaatgaaaatacccttcccatgcaaactggttcaaggtcagggaaaatattgatttgtttgtctgagcatttctactcacagatactccataaatatttaacatagaggatttggcacctcggatgtgggtgccgacctcacttttcgcacttgtgaaaatgggtcatgcctttctggatttgtggtgtgactcaaatggatgagcagccacgtgtacaaatcaacagcaatgacaaatgtatgcccaaatcttgggtaacaaatggcaggcctaaatttagtgctaaaaagtgggccatgagctagcagtgatcctactgactgaaattcacttgcgaatgtggcttggctactctgatttccatcacctccctggctcctttggactccccagcatctacttcctaaaagggagtttgatgttgtttcagcttcttcaaaattaatgtgcattaaaacatgtgtggacataaacaatttggaaaaacaaaccaaacaagtatattatcagagaggtatctattatgtgtaatggtgcctaaagaatgtcactttgttttaaaatacaataaaatggtcactttttttttccagaaatgttgagacctggaatattctgataatttaaatattctggtcttttaagaattgccatttataccatggggggatagcaagttttgatgcattttaaatgcagtgtgatacacaatctagaatagtactgaaaataatttaatctttctttgactattcagactaaggtcaggattgtggaccattcttgagtttttattttgagcattgattatccttatgtaatataaatgggaagtatatagttattggtactttttggccatttgcattattgaaagatgcaaagtaattgtagttttattgagtctggtcattttatgacttcattcattcattcattcattcattcctcaaacatttggttgaacacctagtgccaggtactatggcagtcactggggataaaaagacaagtaataatgatgaagaataagaagaaaggccaggtgcattggctcatgcttgtagtcccagcactttgggaggctgaggtgggcggatcacctgaggtcaggagttcaagatcagcctggccaacatagtgaaactccatttctacaaaaatgcaaaaattagctaggcatgatggcgggtacctgtaatcccagctacttgggaggctgaggcaagcacttgaacccaggaggcggaggttgyagtgagccgagatcgcgccactgcattccagcctgggaacagaggagactctgacagaaaaaaaaaaaaaaagaaaataatgataacagccagaacaagcatttaaatagacaatatttctggtgctttagacatattaacccatgtaatgctcataagaacccaatgagataagggatatttatatcacagatgagaaaactgaggcataaagacattaaggaacttgccgaagatcacacagttaataagtgttgatctgggctcaaatcccagscatctaggctctaggatctgagctcctaaccactaggctgcactccctgtgatccctgccatcaaagagtttacagtacattttagtgcaagagataaacaaccaatcacataatacaaaaagtgtgacaatgaaagaaatgtgcctggctcatattaggccatgcctgagaagccttcctgtcaagggccctgctgtccatgctgattcttgaggaatggaaagggtaaataaggaaaggatggggtgcaccagtctgtcagtggagagccacgtgtggaccctcaagattctagctgaagcctggtccattgaaagaactgtctggggttcactggaaaagaggataataatattcaacctaacaaaaaactgatgacctgatgtagtatggtaatttttttaaaaagtaaattctcaacaaagaatctatttggtgttaatcttagtgcagtgggcaaagcccacagcaacagcataatgccatatccccaataagggcatgcactctatagagtgtttcttgatttccctgaacaaaagagtcagaaaatgatgtagctcttgagctgtgtctatttacatcctcctcagacggtttataagttacaccagaaacaaaggaaacggatctctctcatggccctgactttccacaggatcttctggtctggttaatgaggcatgtgtgggcagcactaggatgaatctgttgtttttgttcctactggtgtggacagaatcgtctggaaatggaaatcagccagaaatacgtaccaagaagggcattgttcacagaataccttcttgctctggkccattacctctagtcattaacattcttccattctccaatttctatacctcaacacccctaagattgctacactggaccatttttacaattcagaaatactttctatgtgaaatatcttctgagttttcacagagaatacgtaacacaagatgctttccctagcatctcttcccccacattctccttgcyctgcttgtgaaagtacccagagccctctcaaagcacttctgagtacttttaacctttatttgaatgaaaaaatgatagtcctggacccatgtagggataactttattaatagcgttatcataattcctgtgtaaacaagcttacagttttgagtgcagttaccttttgcagtaaaatattttatgctgttccaactgcagcccaaatgtaagtcccagctactggagggttttggggtcatctttacaactttttagattgggttgctggaggttttggtgtcacctttataacttttacataagtatccacaatcatcttctcttcttaaacagaacacattctatactttgtgctataaggggctaaattttcctgagacatagatgttgttctttagagctggccaagtacttccgagtggtatacctatagttcagataactttcattttttcctcttattttttgacaatactwattctttttgaagatagaaacaaaataaatatggaaaagcttgtaaaagttagcataaatcttacaaccataaacactactttttcccccacagcaatggttgcccctctcttattctaatgatctgttctgtggtgtacttacaggaatgccaaaaagtgcatttgggtggggcttttccatacctttcataactgtggagaacaattaacaatgagctgagtcacctggaacactgactttaaagaaaaggttgaaagtaggattattgccttacccacagtctagcttgtgtctttcctttcacactttttctctttatcctgagttgatctaactatatgtctatcgtttttttgatatattatttgcttgcttattcattaattttgttcaacaaacacaaaattgatggtccaagatttcaagaacttggaatgtagtagggaaattctaagaaagtgatgatacagatctttgttgagtccagttctcttggagaagtgacagtaaagtttgttcacttcaggtggtgaggaaatgattgctagccaatgaactggctgagtcttgtatcaaaaagttaacccatctcaaaagcaaaaggcaatttctactcctttttcatgagtaaaggtaaggtctagatatttatatctttcaggccagagattagattttttttttttttagcatccaccccatagtagttgctgacatattacatataaacacatctgtttcgctctttgggttttgaaaaagctgatggtttaaacaaatttacttattattttttggctttagttttaggatatcttgcatggcaaatttattgtgttgccttgatatagctattatcaagcttgaatggctattctcagaatagctttatatttattacaagcaatttgtatttattaccacttgcagcaactctgggaggtggtcagaattagtgctagtctgtatagaagaggcccaagggccttgcaggttctctgatgtcatctgtttggtcaatggtgtgactagagtaaggactcgctgctgctgagctctcacgtttaccctgttcagatgactttcgagtcccttcctcctgctctttcttctcatgaagttagtggtgttggtaatgacagagtaaatgctggacgttgggagctggaaactctgtctttggtttttgtggaaggattgcttgaagatggaggttgttccctcaaccctgcagcttattcaaattggtgaagcctaatcgctaatttaaaaaagtgtaatgcatcattgcctaatttggcaatggggatatagatgtcacattgtgtttgtttagcaggatgagcctttgagggaggctcaaaaatattatatacacacataatgcatttacacatatacgtatgtatatatttgttgttcttttgatgtggaaaaagatgactgtgatgtgagtgtaaagtgtttgcaaattcttattcagaatctagggcccaaactattcacaaacctgacttcacacttgagttttttttttttccaactttaaccagtcttaatatagatagtgagtgtcacagggtttgcatatagaatagtcgagataataactgtcattgaaaaagcaggtgtctgggaagaaggaagattttaaactgatgaacccagggcagacactatcatagtctaggacctgaaagcctcagagctggggccgtttaattctctacgggtttcagacccctgagggagaagggctgcacaaatggtggaaagtgtgactgaacacatatgtacacaaagcatcatctctggactgaattagtgatgataactaaatatactgagcacttcccatgccaggcactttgcatccattacctcatttaattttgaccacaaccccaggttatagatatgactattagtatttccattttccagatgaatactcaaataggcttacagaggtaaagtaatttgcccaaggacacgtagttaggtagagatggagtcagattcaaacctcaattcttaactgtaaagacctgtgttcttaaccataaagacctgtatttttaattaccttatagtattgtctactaatagttggattctgggaaatttttgatattgaaaagaaatttttatattcaaaaagctggaatggcaaataagtcttaacttgtgcgccaaagtcaattaattggtagtagccgcctctgtggagaagggtgggaaatccatccgcaggcccagtgggaaaggctgctatggtcaatttactgtggctggtgtggagggaggtaaaggtggtgtgagtgctgtgtacttgcagcctgttaaaattatatttcaagaagagtcttagaattcatctaggtcaatcttttcagtttatcaaagataaagctgcagcccaacatggggtagtttcactcatttgatattatacgtctagcctctggggacagctacatttagaacccaagtctcctggttcccagccctgtgcccttgtctctagcactacgggtaaatccaaaatagtccttttagagggtgttctgatgagagaaggtgactctcaagcattcctgtactttaaaaatggcttcaaagtaaaagattgtcaaccagattctgtcagcattataaagcttctctctgcaggaagttggattaattcttgcaaacttcaggatatcagactgctaacatttcaagacagaatcactgcagagttccctggggacatcaagtagtttggttcaatgtttacagagaatccactctggacatagagaagagggtacaatagctgctccccaaaactgaggggcttagagagagacctggatagaaaatgagaagcaaactcagtcagacttctccattgggcaatagaagttggaatcaaagacatggatgctattttataccccttgggacacactgtagtattcagagataggagacttcatgggctgcatggatgttcctggaactcagcacacagtcagctcatggtcaggtaaatgaggccatttatatgggtgacattacttcatttgttggcttcattcactggctgctcccccatctccaggttcttgtcattctccaggctaatccatgggtaccattattacccccatattcattaacagccaaacagcaacactggtcccatactccatgggtggaaaggtctccagcaggtaaccagcatatcacacgcatagcagactcctgagggtaggctgcgtttttgagaacttaagacaattaacttccagtttttcctttaaatgttacattggtcaagcgtgatctatattcctaatggcctgcctcaaattacatgtgtgtgaacccactggtttttcttgaagtctggggcagagtgccgtatgctctgggccttttcttgatctactttaatgctttttagctgttaaaatgactaaatacgtatctggctatccagtggaattgtcacaaaatgatattttttccaaaaccacactgatttcagtctctgtcattgcatacacacctctggaggcatcctctatacatagtgactgctaaggttgctaatgtcttatagaagcaatggagacacaaacagatgagtttcacttctttcttgtgcttgtccttgacccagtgaaatgtctttagcttagcaaggatgtcccaagggagccatggctttaatgttcttacagcctattctgctaccactctggccatgaccctgaatgcagggatgagagagtaggaagactaaacacattgagccagccacagtcctttccatatgtactgatggatgaatggactgttagaacaacgtagtacattaaatgtaaccagagtgtacggatgcaaagaaagctaattcgaattctgaaaatcatggcaagccaacaggaagccaattttttgcagaggggcaacaactttcataaagggacattttgtttcttgaaactgtgaatatgtttctaaaattgtggacagaattattggtcatgtggaaccaaaatcccttgatgttcactgccctgcattgaatctagcacaaatgcatttgcaagtgtagtgaccttctgcttataatgaagttgttctgtgggccaaaaaaaatgagttcacgctgagaggccctctgcattctgtgattcatatatgcatttatctggacaatggaactttgcaggaaagcaaatcacatgcagggtgccctttctcttacatgtcagtcttttggttctcaattgcattttcaaacttagggaaccacagacttcttcatggagggctgtaaatcattccatgcattttgaaattgttggaggaatgcacgaagaatattgaacaggaaagggttttctgaatttctccaggaaaccttagctgttagagactgagaaggtagaaaagtataatgggtggaatccagaggctgggatagagattgtcttcagaatcttcccgcctaaaactctcatttacagttgaggaaatggaggcacagggaggttgaatgattgctgaggttacccagttagacctggactaaagccccagttttccaactctcagttcacggcagtttctgctaccccattttttctctctgcctctctctcccaactaatttcccccttaaattaagaaaaagaattaagaggagtatttctcaatatatagttcacaaccacttatattggagtcaacttggatgcctttaaaatgaagatttctaggtttcatccagacctgccaaatgaaattgagaccctggatatctgcattttcataagctcctcagtgattcttatgcacattgcatttttagaaccatcaatctagggtctataaataggcagcacatggcaggaaatgaccactaacttttaacatcactgaatttatcttgagaatatagtcattcattgttccctgctgttcttagtgctagtcatgtagtgagctgaacggagctaatgatggttcaaagagtaattacgccagctttcctgtttttctaatacctgctcttggcataactctgactattaatattagctccttttttcctcaagtggcaatatttatctgctgtatattgctctgctgtacttggtggaaggtaaatgaatgctttttaagtatcctcaaatatacaggcccactccagactctgttgatacacagtacctggcctcaaaatatctcccaatgaatagacaaatagtttagtcagagccccaattacctctccatgcagataattattacttctgccatttaagtgaaattttagtacattgcttatagcaataaattttggagcatatttatgctgtccctgcttctattcatagcatagatttaaaatcccatttctgtgggggaatagctctgaactgtccttcagtatgaatttggctggtaataaattaaataataccacaatctcattttctcccacagtacctagcatacttaaaaaagcaaaacaaacaaacaaccaaacaaaatcctagtttccaatttaccctgcacacaggagagttccatatttcatgacagactagtaactgagcagctctgtaggattaccgagctatcaaatgtgttgtaaaaatgtgatgtcatggagcttcggaagtctcattrcagagtttaacaggttttgtggtatattttgcagcacgccctttctgacaaggcatgtgtgaaagcctttgacccaaagacaacttgcttacaggaatgccttatcaccaccttccaggaagcctactttgtttcagaaagttttgaagaagccaaagaaaagatgaggtaaacttttttttcctcctagctagagaaaataactttttatttttctgtctctattccttccttttatctatccctygtaccaatgagggttgatcacatctctttctacttctgtttattctgcagggactttgcaaagtcaattacccgtcccttctcagtatacttcaatccctacacacagagtattgaaattctgaaagacaccagaagtattgaaaatgtggtgcaggaccttcgcagcgacttgaatacagtgtgtgatgctttaaacaaaatgaaccaatatctggggatttgatgcctggaactatgttgttgccagcatgatctttttggggcttagcagcagttcagtcaatgtcatataacgcaaataaccttctgtgtcatggcttggctaataagcatgcaattccatatatctataccatcttgtaactcactgtgttagtatataaagcaccataagaaatccaatggcagataaccactcattgtatgaaataacgtattatgtttaaacatcttaaaaagatttgacattcctgcttagtgtccttaaccaaactgcatctagttaaaatttgtaacaaatagccctcttatgagtctcatttatgcccttttctttttcagatctaagcctttcctctgtgttcattagataaaatgaaaaaaagcagtgaagctgtttccattttcaatagtatcagtgttttcacgcattatttgagataaacccagaattgtaggaaacttcccatcacaataacaaaggttcaatattctatttcaaaaattgttgaggtaacacagcagttggaatgatttttaggttgagtatttacacaatgcaagaaaacacctttttacaaatggaattatgtaggttgcgttgaccttgtagaacctgagttatgacaagcttcctgaagtattttggaagatagtacttccggaaaggacattaggaaagactaaacagtggacaatcaatcttgggactatgaattttatgctggaataaagtaaattatcatgttcaggtgtttaaacaatttttttctggtcagaggagaataaaatcacagagctataaagatcatctttgatttcagagatgtggaaattgagtcacagagaagttgtgatttgcctgaagcagtacagtgagttgtacactaacattcacagtccattgcactttccttttgttttgctgataaattcgtcccagtgcttgcatgtgtttctgtgtcatccgagatgggaaacttcatcttggtgtgtgcatgtgttaatatgtcattggagataggaaataatgcctatccaaactaatgtttatcagtaaatagaacttggtttgtggtcaagggttgccaactgtatatatgttgtttcccctcacagctgcaaatcaggccaaatctatggaaggttctccactttcctaaagtttgggcaactttgggtaaacagtagtgatgcagcacacagttttggtggtctttgcagtaaaagatgaaattaagtggttaagtgaacaaatagaaaactgctgagagtgaatgaatttctttggattccctcactgaacataactactgttcttctgattctgcatttggtagtaaggaacactggactggggaaggaaggggcaagaaaaactagagaaaaaaaatgacaaaataacctttagcaatttaaaatatttacttgagcaatttccaaagatgttcttttagtaagaaattacatataattttaaactaattcatactcttatgtggagcccacaaagggtcagaaatctttggactaaatatattcaggaagaacatgagaaagagctaaaagacacatcagggagagatcaaactaaaatgaaaacccagaggtttgaatattggttgtcttaacgattgaggatcttttatctctgaagcattctcagaacaactgaattttgagaaataatttggtggatagaatgtgagagtcacaaaatataaatgctattccaggtgaagggaatagtgccttgaaaaattggtggtggagaaatgaggaacaagctaaaccaaatttaaaagatctagattgatcaagcagtcatatattttgatagtttcatagatccataaatatatagtttcttatatcttgctttgctagctttagatgaccctgaataaattacttataaattagaatccagaatcataatccagaatagcatatccacagattttcagaactggttgctgaattttctcagagaagaaaattggctaagaaatgctcaatgtctgccttcggtgttgttttcataatttggtattgctttagacacaagtcctagagtcctgtcatatatattcattaaaaaacccttacaagtagccatcaagctttccccttgtagtcccatgagattagagcttcttaattaaatatacttgagagagaattatatttaattgtaaacaaattccctcaacaaaaaaatagcatttgaagtgccttctgcttggcttgtagtggaatccagttttctaatatgtgcaaaaatctatcttgtttcaaaaataaaagagttgcaaagtaaatgggctttcccacagagcttatataggtatcatacaaggaagtggaattacttgattctttttagatttgttctccatttggaatagcagtaaccgtagttttccccctgtgaaacaatggaatcatggttttcatttgttgtgagcatttaacatgcaaatgccattacagctaatggtgggaaaaatcctataaactttaatagccatcataggaaaagtgttggcagaaaaattccccgtaaggaaatagtgtaacaaaataatcacagccagcttcttgtcatatttgatacctgctcagtgtaaccatttatctcaattatgcttcatgacttaaagctaaattaaatagatccaagggcaattataaatttaaagacacttgctcactgtcatctcactgtgagttgttactttattatggctttgctgctgacttctgtaatcagctaatcagaaatcaacacaaaattcctggcaggaccagggtgcttacctgtcacattttgcaaaagatagccagaatctgattagtccagttttattcttgaagcattttagtctattatgagttagaataaggcatacagtatattcttgaatgttccttttgtttggcataatgaaagcataatagactatttataaattataccttttgagagtgggaaaatttgaactgaaatttcttcttcctttttttttcttccacattagtggtgaaagttgtgagacttgggtttctgacttagtctcatttatgtactgtgtaatttacaaatgacgctttatgggcatgatgtatctgtgcttgtcttgcttatagtaaatgggcctgagcctaatggttgtgaagtattgcaacatttaccaacatgaaaagtctacagtgaaaaacagtgtgctttaacgtgaaatcaaatagaaatacagagtttcattttcaaatggagtcatggctggcatcacctcattttcttcattcgaggaggaaaacattaacacaagatgtagttgtcctccaattcatttgatctaattttcaacttctaaagaatcaagtcttgatgtttattctttcaaacttgtcttacttataatgaagaagaaagcagtccagagttttctggtgtgtctgaggttttttttttccttttgggaaatgattcttatgcaaattgtcatgttctggggacactcaaaggaattaacaatgggagactgcttcttgtaatattagatttgcaaatgtttgaaataaaaccagttctagaacataaaatgatggttctttataatgcgacttggagtttcaaaacattcacccagtttcttggaacatgtcaggcgcaatatcagcattgttttagacgctgaggatgtagtgatgaataaagcagaggaggtttatacccactttgagcctacattctagagggagatacaggcaaaacaaaacaaaacaaaaaaacagatgagttgaaatcacagcaagttctatgaagaaaataatcacaatgatttgataaagagaaatggggagatggtgtcagggttagggttttctgagcaggtggcatttgaccaagaaccagggatgagatggagccaggcctgaagagggccatggttagcgtgttctcagaagagggaacaagaaggaccgaaggctccaaatccaaattgggtttatgtgtttgaggaagagacaggttgtccgtgggtggaatggaattatatgagggcagcatggaagacaaggatgagttaatagtacagggttccacaagaggtcaggagcactctccgtgcagcggaaggtcactggagggatgtaaggaagacagtgacaagatctgatttacatttgtaagagcttactcaggctgctctgtggaaagggagtgtagtggggttaaagggtgggtgtgggaataagggtagaagcagtgaaaccaattaggaggccattgcaatattggggatctgcaaagtcaatatcttacttgatcatggtggatgttattaaaaatagttgtaattaaataagttacaaagttaagagggtaggcgccatcaggtgaaaagcagagaaactggaatgatctgtacctgggttgattctcatttggctggaaaagaaggcatccaaacatatgctgtgtctttgacaaatacttaaagcttcctttgacaaacatcatgtgaaactttctctggccagcttttaagggaaagaaagctacactgaaaagcaaacgcattttttttttcttgtgactcacagatattgacaacagaagcaaaaatgacacagaaaatgaggtattattggtgaatgttggtggtgctgacatatagggtaattcaggaaaaaaacctctcttacctccaggcaaactgaatagttgtgttcactgttcactctgctatttctgtaggaataagccatataaacgttagtggattagttaagtctatttccactcttatctctgcctctcatctccccaaatgcrtagttcagatattccagaaaaggttcacctgctgtgattttgtcctctttccaagaaggatgggtctggtgcagcagctggaagtatatttccttctttgggaagattgcagtgagcctgatgttcagcccaggggcatctgtggttatggtgcctgcaaacagcattctcataatccagtctggatacagtttttataattgaacaacaaaaacatctgacagatgtgggcagggtaatttgaaagctagatggcacaaagaaatcaagttcattttctgtcaaaatcaaatctttaaaaaatggtacaaaactagtccttagtttacaggttgagaaaggtaatattaattacaggcaggtgggaggaagttcctggtccctccttcactcctagatctcttgcagtctccttgctttttagcttgttcatttccatggaactagcaagattgctgattcagtaggtctattattcccaaaggtttgcaaaccactgaacacatctaatgtacagcttgcccaattttagcgaacagctaacttcacagacgctaatgaggccaattattggcaagtgaatttgaagtgaagaacacattagatttgccactatagctgttatttgtttatcaggattgattgaggcaaactttcttttgatcattacatctgattgatcactgcacatggcattatgaaagaatgaggtttccaagttagatagctacttgtaagaaaaatctctaccttgcaagggcagaacatgtttccctatccatttcagtgtgaaagcctagccattaaattggaatggatcctaattagtctccttgcaaatctctaaaactttttggtctttcctgttgagcagaacttaaaagaagcctaaatttctcccttgcccacgtagagtcaatatcaaagaaaataacttgcatggtaatgctgctgaaaatgagtgcagacatagcaatcttgatttgaagtggcattggaaagtataatttgattcacccagccaaatgattwctgcaagtacagatcatcagcatggcccactccaggacatttgaattgctgatgagctgacagctaattgccagactgagtctgcctcttgagcttctgcctgagaacagagggaaaaagccccata

SEQ ID NO: 95260 - DNA, 36742 bp, Homo sapiens
tgtcgcccaggctggagtgcagtggtgtgatttcagctcactgcaacctccgcccctgagttcaagcgattctcctgcctcagcctgccgagtagctgggattacaggcacctgccaccgtgcctggctaatttttgtgtttttagtagagacggggtttcaccatcttggccaggctagtcttgaactgctgacctcatgacccacctgcctcggcctccctgggattataggcgtgagccaccatgcccggctgtgatgatgtttttctcttggtttatcatggccacagagtagccttgtctggtgttcatgtattgtgaaattatttacttcagtggaacatcaaggcctagctgatagtaccaggcccactaccacatgccagggcttcatttcctttctcagaactcacacccgttcccaaatgttaccaagctgttccttgcctaagaggctcttttccattccccagccaaacactacttttttcaagtcaaactgcacaaaattccatctctcctgtgaggtcttcccaaagacagtgaaaccacctttgcaatattataactgatacagtgaaagtgatctaacttaaccaactccatcttgtttttaacctccaagctgtccttgttcattcctgggcgtaggctgaactaactttgggagaaatttatttataatttacagtgaaacaaagacaatggctgggcacagtggctcatgcctgtaatcccagcactttgagaggccgaggtgggtggatcacttgaggtcaggagttcgagaccaatctgaccaatatggtgaaaccccgtttctactaaaaatacaaaaatcagctgagcatggtggcgtgtgactgtagtcctagctaccagggaggctgagacaggagaattgcttgaacccagaaggcagagattgcaccgctgcactccagcctaggcaacagagagagactctgtctcgaaaataaatacatacgtacatacatacaatacataaaacaaagacgataacagccctttcccaaagcagaccatcttccttcttgcctagggactaggttgcctctgtaggactaacattagctgcaagattataaataattatggtttaggagtcatgcagctggaggatacaagattctgaccctccctaaactgctcctaagatcagtgcttgagatattttgcagaccctgcacttgatggatcagctggccccacccaggtcgataaactggctcacctgatcttgtggcccccatccaggaactgactcagagcaagaagacaacatcgacggcctatgatttcatccctgaccagtcagcactcctggctcactggcttcccccaaatcaccaagttattcttaaaaactctgctccccgactgggcatggtggctcatgcctgtaatcccagcactttgggaggcagaggcgggtggatcacctgaggtcaggagttcgagaccagcctggccaacatggtgaaaccccgtctctactaaaaatacaaaattagctgggcatggtggcgcatgcctgtaatcccagctactctgggtgctgaggcagaattccctgagcccaggaggtggagaccgcagtgagctgagattgcgccaccacactccagcctaggtggcagagcgagactccgtctcagaacaaaacaaaacaaaaaaccaaaacaccaccaccaacaacaaaaactctgctcccccaatgcttggggaaactgacttgagtaataataaaactccggtatcctgcacagctggctctgcgtgaattactctttctctgttgcaattcccctgtcttgatgagttggctcaggcaaagtgaaccccttgggtcgttacaacagtactactgtctccatagaattagctttcctgagtgcatccaaaaatcttaattggtgaccaggcatggtagttcatgcctgtaatcaaagcaatttgggaagctgaggctagaggatggcttgagcccaggagttcaaggccagtctgggcaacatagtgagaccttgtctctataaaaccaaaaaccaaaaaccttggtgggcatagcatacttagtcttcaaatgtgtacctaccttgaagtatttcacttgtttcacatatatttttattcagttcccagtaggttgtaaatcttttagaggcaaagtccatttcttacacttcaatatcccctgcaactgagcaccctgctgaaggacaggttggtcttagttggcatgttggttggtctgaataaggggagggggcgaacagtttgcttctgcaacacagctctgaaaacacagctctaggctagcaggggagaagctcccagcttgcccctttcccaggcaaaaccatttcttttttttaatttttaattttttattttttgagacagagtcttactctgtcgtccaggctggagtgcagtgatgtgatctcagcctttttgtgtttttttttcttttttttgagacggagtctcactctgtcacccaggctggagtgcagtggcgcgatctcggctcactgtaagctctgcctcccaagttcacgccattctcctgcctcagcctcccgagtagctgggactacaggcgcccgccaccacgcctggctaattttttttgtatttttagtagagacagggtttcaccgtgttagccaggatggtctcaatctcctgacctcgtgatctgcccgcctgggcctcccaaagtgctgggattacaggcgtgagccaccacgcctggccgtgatctcagcttactgcaacctctgccttcccggttcaagcgattctcatgcctcagcctcctgagtagctgggatgaccggcacgtgccccatgcctggctaatttttgtatttttaatagagaggggtttcaccatgttggccaggtgggtctcaaactcctggcctcaggtgatctgcccacctcggtctcctattgggattataggcgtgagccaccgcaaccggccttctaatttcccttttggagcattcattccgttgcaagagcttatttaatttttatttatttatttatttatttatttttgagacagagttttgctcttgttgcccaggctggagggctatcacgccatcttggctcaccgcaaccttcgcctcctgggtccaagtgattgtcctgcctcaggctcctgagtagctgggattacaggcatgtgccaccatgccctgctaattttgtattttcactagagatgggttttctccatgttggtcaggcaggtctcgaactcccgacctcaggtgatccggccgcctcggcctcccaaagtgctggaattacaggcgtgagccactgcgcctggccaatttttatttatttatttagaaacagggtaaacctctgtcatccgggctggagtgcagtggcacaattgtagctcactgcagtcccaaactcctgggcttaagcgatcctcctgccttggcctcccaagtagctgggactacaggcgtgtgctaccgcacctagctaagttgtgtattttctaattttttagacaggggtctcagtattgctgaggctgatctccaactcctgggctgaagcgatcctatcctcttgccctctcgaagtgctgagattaccagcatgagccaccacactggaccaagagttgattttggtaacatcttctgtccctatctgtctgaaaaatccttgagagtaggatctaccattaatgcattaaacaaattattattttttgtttgtttattttgagatggagtcttactctgtaacccaggctagagtgcagtggcgctatctcagctcactgaaacctctgcctcccaggttcaagtgattctcctgcctcagcctcctgaatagctgggattacaggtgcgtgccatgatgcccagctaattttttatatttatttatttttatttttatttttttgagttggagtcttgctctgtcgcctaggctggaatgctgtggcatgatcttggctcactgcagcctccctctcctcggttcaagcgattctcctacctcagcctcctgagtagctgggaccacaggcaagtgccaccacgccccagctaatttttgtatttttagtagagacggggtttcaccatgttggtcaggctagtctcgaactcctgacctcaagtgatctgcctgcttcatcctcccaaagcgctgggattacaggcatgagccactgcgcctgatggtatttttagtagagaaagggtttcaccatgttggcccggctggtcttgaactcctggcctcaagtgattcacctgccttaggctcccaaagtgctgggattacaggcttgagccaatgcgatggcctaccattaatgcatttttgtatatctcctcccacccccacaaactgtcaggcacggggcttagtgggtggaggaaaggcccagcaatgcctgagtaagcccaactcctgcctgcctcttcgcagaaactagggtgcatccaaactgtctcttctcaggctrggcaggacagcgcggcctcacctgtgaaccttcaagacttggactttggctgaagcgagggcgtaggagttctaagtaccgctggctgcacgccctctggcccatcacgtcccaggctgctcctaggtggacacccaacaggttaggcaagtcttagttaaaagcagtgagaggccaagaggctgggcatggtggctcacgcctataatcccagcactttgggaggccgaggcaggcagatcacaaggtcagaagatcgagaccatcctggccaacatggtgaaaccctgtctctactaaaatacaaaaaattagtcaggcgtggtggtgtgtgcctctagtcccagctgctccggagactgaggcaggggaatcgcttgaacccgggaggcggagattgcagtgagccgagattgtgccactgcactccggcctgggcaacagagtgagactccgtctcaaaaaaaaaaaaaaaaaaaaaagcagtgaggaggctgggcacagtggctcacacctgtaatctcagcactttggcagaccgaggtggatggatgccaggagttctagaccagcctaggcaacttagggagactctgtctctacaaaaaatgcaaaaattagctgagtgttgcggcgcgcacctgtagtcccagctactcgggaggctgaggtgggaggatcgatgtccaggaagtccagcctgcattgagcccacatcctgccactgcactccagcctgggtgacagagagaggccctgtctcaaaaaaaaaaaaaaaaaaaagaaagagagaaagaaagaaagaaaaaataaaaacagccaacgaccaaacaaataaaagagcagtgagaaccagacacggtggctcatgcctgtaatcccagcactttgggaggcagaggcaggaggatcacttgagcccaggaggtccagaccaacgtgggaaacatagcaagaccttgtctctacaaaaataaaaataaaaaaattaggcttggggatacaggtctgcaagcctacttgggaggctgaggtgggaggatcagtgaaacttgaggtcaaggctgcagtgagctgtgattacatcactgcactccagcctgggtaacggaagagagacactgcctctaggaaaaaaaaaaaaaaaaaaaaaaaaaggcaaggagttccaatcattctcccttcacagagaagcagcttggattcgatgggactgtagtttctggaatccgactgcaaagctgaccgctggtagagcccagcttctaacttaggaaaggcactagctctctacaaagccgccactccccaactacaccctgtagggaccagccaatcccaaagcccgagcgggcgtcatcaccaattgcaaggcgggagacagagccttggctggcaccgggcctcctccccggacccgcagaggcctggcagcgccgcgtttgaggagggttcgtgtcaggaagtcaaggctggatgatcgcttaagcccaggagttaaagaccggcccggacaacaaagcgagaccccgtctctccagaaaaagaaaaaaagagagagagagagagaaattagccgggcgtggtggcgtacgcttgtagtcccatctacttaggaggctgaggtgggaggatcgcttgagcccaggaggtggaggctgcactgagctatgatcgccccactgccctccagrgtgggcgacagagccagaccctgttgctaaaaaaaaaaaaaaaatccataaagccggggaccatctttgctccagggaggtcagctgacccgggctggcactggccctggggcagttcccgcccctcccgggagcgctggcaccgccccttggcaccaccccctccccgcgcccccgccttccaggaaggggcggggtctccgagacgggtggggccggagctccaagctggtttgaacaagccctgggcatgtttggcgggaagttggcttagctcggctacctgtggccccgcagttttgtagtccccgccttgtttctccccagaggcctctcaatcctccctccatgatcttcgcatagagcacagtaccccttcacacggaggacgcgatggctcccaagaaacgcccagaaacccagaagacctccgagattgtattacgccccaggaacaagaggagcaggagtcccctggagctggagcccgaggccaagaagctctgtgcgaagggctccggtackgcctgtgcctgctgcttgaatatttccgccttttagggtgctcgcgcaggaggctgcagcgggggatgggtgctccgaggctcccgaggcccgcgcaggtcacgggtgcctccggctgtgcattctacctgcaggtcctttgacaccagagtgtttaggtttcaacacctctcccgctaggtaacaggaagcagatgagctccgtaacaacagacacacggacttgtcagattccttgttcgtatcagggttcttgcacagttaggacggcttcagagaatcctacctttcctggcgctgtgtgtgctggatttcatagtcacgcttgttagctgcacgtcctcggtggtcagttgtgagagcccccaattccttcctccttagaaagctcattctctgaggtttactggggcttgaacctggggctataaggagtttcgagacactcaaaaacgagctggggcttgttaatcaagtggtttttgtccatgagaagaaagaattggttgtcaagacgtcggacctatagtgattgggtcctcaaatacagtttggtgatcaggagttgttgctttattgctattctaatttcacttacctccccagaagtaacctagttaagagcatttccaggccttcctattccttcttttcctaaacggtgacttctgccatgctgccctaaaatctttttattgtgcattatatgtgatttataaaattgtgacccagtcccatctcgagttttgcagcccaaactgggaagagttctgcattgtactttatccttgtgtgtttctttggctggggtctcaggaaccctgcacgactgtatttactttcacttcagacttactgttygtgggagtgttttggggaaggggccaaatcctcactcatttttttatttctggtgctcgttgagaccacacagacatggaaaggccgcaggaggtgatgagacagagattaaccgtgccgaakgaaacaaggcttcctttyggggaattcagcagaaaaacctttcgtgagattggagaggaaaatatgtctgttctgcttggcaggtcctagcagaagatgtgactcagactgcctctgggtggggctggctggcccacagatcctgccaccatgccgcagcatcgtcaggaccctccaccagcataagctgggcagagcttcctggccatctgtccagcaggtaaggcattttttgcctcaagtcctcaagggtttacacgtgcatttttactattgcatgctcccaaattagatgatggcttggttcaccagcttgtcagagtggtccgatcacccagactgtggtgactggcctactgggcactcagccaggtaaaaaatgtcttatgttgtaaaggtcccagctggaatgcactctgccccttttgctttccaagattattcgwtcgtgtacattgcaaatattttcatgcacagggcaggcagttagctttcctttggtgggaggacttggatctagggctcatccatgaaggaggcagagattggcagtttacccagaacttgggttttaattcaacctaattcatttctctctgtggcaggggctccagcagtcctttttgcacactctggattcttaccggatattacaaaaggctgccccctttgacaggagggctacatccttggcgtggcacccaactcaccccagcacygtggctgtgggttccaaagggggagatatcatgctctggaattttggcatcaaggacaaacccaccttcatcaaaggggtgagcagttccccatgccaggtcgtgctaaagaagtgtttgttggctgggtgcagtggttcgcrcctgtaatcccagcactttgggaggccaaggtgggtggatcacctgaggtatggagtttgagaccagcctggccaacatggtgaaaccccgtctctactaaaaatacaaaaattagctgggtgtggtggcaggcgcctataatcccagctackcaggaggctgaggcaggagaattgcttgaacccgggaggcagaggttgcagtgagccaagattgcaccattacactccagcctgggcaacaagartgaaactccatctcaaaataataataataataataataaaagaaaataaaaataaggagtgtttgttgaaggcatgaaaggaatattgatgtcatccagtaatcatcaggaagaggactgggatcaaaattaactgtgggcattttcaaatacgtaaatgatgatgatatatatttttctaatgcctgtccttaaaatactagaagatatagactattgatcacccatagaattgaagccccttctgggctgggcgcagtggctcaggcctgtaatcctagcactttgggaggccaaggtgggctgaccacgaggtcaagagatggagaccatcctggccaacatggtgaaaccccgtctctactaaagatacaaaaaattagctggatgtggtggtgtgcgcctgtagtcccagctacttgggacactgaggcaggagaatcgcttgaacccgggaggcgaaggttgcagtgagccgaaatcacgccactgcactccagcctgggcaacagagcgagactccatctcaaaaaaaaagaattgaagccccttcttaccacattgacctcatcttacgccattgtcttttctcacttctatgctgtagccacaccagctgtttctattcctgaaaccgggtctctgtaattgctgttccctttgactggagtgcttttcccccatggtcttctcatggctggcgtcttctctgcaggtctttgctgattctacctcttcaaagaggctttcgctggttgtccttactcataacgtagatcccactcctccaccgtcattccctgtatcattaccctgcttcatgtttcccccaagtgttgatgggtgtctgagatctgatgcttatttgtatgtttgcccactgatggcagggacctttcctttctggttcaccatcctattcccagtgcctggaacaaagtttggcctagagtagctgctttatatttgttgaatgagtgaggggcttgaagtgtaattgagcagatgggatgtatacatacgaggtaattaacaatacagatgccaagtgctacagaatgtgaaagaaggaagaaccccttgtgaattggagtcaataaagaagactccatggatgagcgaggaggagcagtattagataaatggagagaaaagaaggaaagacatagtgtgactgggtgaggtttggcacagagttcttgggaatggtctttgttgtgctagagtttatcatccattgctgargggtgagtgtgtcgtcccctctaggacctttagccagcccagctggtggctgacattggagggctgtgctgtgaaaagtgacactgggtttagagcaggagtcacaaacttatagggctccagaagccagagtggaaaaaaaaaaaaaaagaatgtatggtggtagggtcaggggtaaactagagatgactgttgtgcaaaaatgtaggtcttttgatatcagatgtgatttttctcaaacaaagacacaaatcctcattttttaaatgtcatatatcttgagttttaaaaaaaattgtaaaatacacgtaacataaaatgtatcaccttawccatttaaaagtgttttttttttgaggcggactctcgctctgtcacccaggctggagtgcagtggcgcaatcttggctcactgcaagctccgcctcccggattcatgccattctcctgcctcagcctccccagcagctgggactgcaggtgcatgctgccacgcctggctaatttttgtatttttagtagagatggggtttcaccgtgttagccacgatggtctctatctcctgaccttgtgatctgcctgcctcggcctcccaaagtgctgggattacaggcgtgagccaccgcccccagccaactttttaaaaaataatgataaaatacatataacatgaaatttactttcgtaaccattttaaagtgcacagttcaatggcgttgggtaaattgtgtaagcagtctccagaacttcattatttttttttatttttattttttgagtctcattctgtcacccaggctggagtgcagtgacacaaccatagctcactgcagcctccaccttcctgactcaaggaatcctccggcttcagcctcccatgtatcagggactacaggtacgcaccaccatgcctggctaatttttagagatgtggtctctctatattgcccaggctggtctcaaactactggcctcaagcaatccttctgtcttgtcttcccaaattgctcgggattacagggctgagccactgtgctgggcctctagaacgtcttaatattggcactgaatgaaactaaacacacgtctcagccgaattctgcttcagtccactatttttctagctctggtttaaaggtagacatgagggggaacccaggaggaggtctctttatttatttatttgtttatttttttgagatggagtctcactccgccgcccaggctggagtgcagtggcgcaatctcggctcactgcaagctccgcctcccaggttcacgcgattctcctgcctcagcctccgaagtagctgggactactggtgcccgccaccacacccggctactttttttatattttttagtggagatggggtttcaccgtgttagccatgatggtctcgatctcctgacctcgtgatccgcccgcctcgacctcccaaagtgctgggattacaggcgtgagccactgcacccagccagcaggaggtctcttaagtggagggatttggagagcagaccaccagaaaaggccaggttagacaggtgtgggagactggaattcaaagtgtgagatgggtgttcaaggaacaagtgccagaagcccccagaaaggcagtcagaggagtgccgcggacagagtggggtaggtttcctgcccagctaaagaggcaggtgaccgctaataaggcagcttgaagttgaagtcagaacccagagctcagacaggaagaaatttgttttcttgttttctccaggagtctaggacatgggaatagaggaatttagcttatgcctggagatgggaagaagcagtgtagggtattctaggggaagagcttcctgactaacaggataatgacaagtgctttgaacttgtgccagactgagattgctttttttctttgttgcatcaccttatgacatgcgtgtaaccttctttacagtgtaaactttctttacactgtaatgaagattggtctaggcattgaattttgtggcttgcatttgcagggagctaggttggagcagaggaagggtatggcagtctggaagagacctgtctggttttactcccagatgctgacagcagaatgctgatttgagaccagttactggaggagcaacagtgcctcattttgtcacttctttagtcatctgaccttggctgtgacctttacattcttcaggcccttggcaagggaacatgtattacagtttcacaatgaagatagcttaattttattcctattataaaaacaatgtatggggccaggcgcagtggcccacgcctgtaatcccagcactttgggaggccgaggcgggtggatcacctgaggtcaggagttccgagaccagcctgaccaacacatagtgaaaccctgtctctactaaaaatacaaaaattagccgggagtagtggtgcacgtctgtagttccagctactcaggaatctgaggcaggagaatcacttgaacctgggaggtggaggttgcagtgagctgagatggtgccactgcactccagcctgggcgacacagcgagactccatctctcaaaaaacaaaacagtgtattcttatcataaaatacagagaaaagtgtaaaaaataaattaaatatgatccaaaatccccattttcagcatccctctgtgcatgtgtacactatttttttttttttccaagtctgagtcttgctctgtcgctcaggctggagtgcagtggtgcgatctcacctcactgcaacctccgcctcctgggttcaagctattctccttcctcagcctcccgagtagctgggattacaggcatgcaccaccacaccagctaatttttgttttgttttgtttttttaagacagagtttcactctattgcccaggctggagtgcagtagcacgatctcggcccactgcaacctctgcctcctgagttgaaatgattctcctgcctcagcctcctgagtagctgggattacaggagcctaccaccatgcccagctaatttttgtatttttagtagagacggggtttcaccgtgttggccaggctcgtcttgaactcctggcctaaggtgatccacctgccttggcctcccaaagtgctggcattacaggtgtgagccaccgtgcccagcctgaattttatatttttggtagaaacagggtttcaccatattggccaggctggtctcgaactcctgacctcaagtgatccgcccgcctcggcctcccaaaatgctgggattacaggcacgagccactgcrcccggcctgggtttttaaaattatatctttattgaggtatagtggacataaactgcagctatttcaagtgtacaatttggctattctcagcctatggggtagtcctactccagagaagcagtaagaaaaaaagaataaattgtacaattccatgagttttgacatatgtgtacaactgtgaagccatcaccacaattaaaataactcccatttccccaccctttgttgaatatttggagastgatagatagatgagttatctatgcccctttgtaatccacccctctctacccaatatcttattcactgtaaactgctgatctattttttatttttagaaattaatttacattttctagaactatatataaatagaatcatagaatatatggtcttttatttttgttctagcttgtttcagtataattatttgaaatttatctacatttttatgtgtagttttttttttctttctgaataatggttcattgttttttgttttaagacagggtcttgctgtgtcacccagggatgatcatggttcagcatagcctcaacctcctcagctcaagcgattctcccacctcagcctcctgagtagctggcactacatgcacaggccaccatacctggctaattttaaaattttgttatagagacagaggtctcactgtgttgcacaggctggtttcaaactcctggcctcaagctatcctcctgccttagcctcccaaagtgccgggattataggcgtgagcccctgcacccagccacattgtactgatatgatacagtttattcatttacctgttcaaggacatttgaatttttttctagtttttgaatgcaacatataaagcgactgtgaacattcacgtacaagtatttgtgtggatatatgttttcatttttcttgggtaaatacttagcagtggaatggctggattatagagtaggaatgttttaaagatactttttaaatgagaaaaggtttttctatttgcccacatattgtcatttccagtgctttcattctttcatgtgatccagatttccttttggtaatattttctttctgcctgaagaaattcctttcatatttcttataatgcagattggtgataaatactttccactgttgtttatctagaaaagtattttgcctttattttgagggaggatgtttttgctaagtatagaattctaggttcacagtttttaaaattatttaacttttattttttaattggtaaattaaaattgtattttattgcatacaatatatttgttcacagttttctcctgtcagtactttaaagatgatgtctaggctgggcgctgtggcttacgcctgtaatcccagcattttggggggccaaggcaagtggatcatttgcgatcatgagttttagaccagcctggctaacatggtgaaaccccgcctctactaaaaatacaaaaattagctgggtgtggtggcgctcaccagtaatcccagctacccgggaggctgaggcatgagaatcttgaacctgggaggcagaggttgcagtgagccgagatggtgtcactgcactccattctgggtgacagagcaagactgtgtctcaaaaataaataaataaggctgggcgcggtggctgacacctgtaatcccagcgctttgggaggccgaggcaggcggatcacgagatcaagagattgagaccaccctggctaacacggtgaaaccctgtctgttctaaaaatacaaaaaaaattagccaggcgtggtggtgggcgcctgtagtcccagctacttgggaggctgaggcaggagaatggtgtgaacccaggaggcagagctggcagtgagccgagatcggccacttcactccagcctgggtgacagagcaagactccgtctaaaataaataaataaataaagaataaaaataaagatgatttctagttgggctcaatggttcatgcctgtaatctcaacactttgagaggctgaggctgggggacctcttgaggccaggactttaagaccagcctaggaaacacagcaagaccccatctctacaaaaaaatcttaaaaattagctagtggcttgaacttgtagttccagctgttcaggaggctgaggtgggagaattgcttaagcccagggggacaaggcttcagtgagctaggcaagcctgggtgacagagcaagatcctgtctcaattaaaaacaaaacaaaacaaaacatcctgatgagaagtctgctactatccttatgttcctgtctatgtaatttttcttctggtcgctttaaaaatgattatgatgtgcttgtggggggatcactaagcttctttgatttatggattttttttttcttttgagacagagtctcactctgtcgcccaggctggtgtgcagtgccacaatctcggctcactgcaacctccacctccagggttcaagcgattctccctgcctcagcctcccgagtagctgggattacaggtgcccaccacctcacctggctaatttttgtatttatttatttttattttatttttttagtagagacagggtttcaccatgttggccaggctggtcttgaactcctgacctccagtgatccgcccaccttggcctcctgaagtgctgggattacaggcgtgagccaccttgcccagcccattatttcttacaaagagttcaaaatgaagaaaaagaacagttctttttttcttgggactgcgattacatatggtcctgcaggtggttgatgcactgttcatttttgtctttttccctgtttcattttgtgcagttgttcactgatctttacttctgtaatatctaaccttctgctgtcaatccctccctccctccctcccttcgttcctttctctctcttctcttcctcttccttttctcttctctttcttgcctgtgcagagcagggctgctccataggcaaagtagcccagcrtatttttcatttcagatactgtatatcccctctagaagtttaatttggattttttttcatgtcttccatttctctcctcatatttattatttcctcttctttcttttttgagatgaggtctcactctctcttccaggctggagtrcactggcatgagatctcagctcactgcaacctccacctcccaggttcaagcgacccttctgcctcagcctcctgagtagctgggattacaagtgtgcaccaccacgcccagctaatttttgtatttttagtagagaccaagtttcaccatattggccaggctggtctcagactcctaacctcaagttatccacccaccttggcctcccaaagtgctgggattacaggcttgagacactgctcctggcccgatcctgtgtctttaaaaaaaaaaaaaaaaactctaacaagtaatactgctttttttaaaaaaaattgtgggccaggctcagtggctcacgcctgtaatcccagcactttgggaagctgaggtggacggatcacaaggtcaggagatcgagaccatcctggccaacatggtgaaaccccgtctctactaaaaatacaaaaaattagctgggcatggtcgtgggcgcctgtaatcccagctactggggaggctgaggcaggagaatcacttgaacccgggaggcagaagttgcagtgacccgagattatgccactgcactccagcctgggcaacagagcgagactccatctctattttaaaaaaaaaaaacaaaaaactggtagaaaacacgtaaaacaatttacaatctttactatttttaagtgtacagtttagtaatgttaactatattcacattgttgtgcaacagatcactagaacttttttcttgtaaaactgaaactctatacccactgaacaagcctccacttctccctccccttagcccctggcaaccacagtactactttctgtttctgtgagtttgactactttagatatctcatctaagtggaatcatacagtatttgtctttttgtgacaggcttatttcacttaatgcagtgttttaagattcatccatgttgtagcatgtggcagaatttccttttttaaggctgaataatgttccattgtttgcgtgtaccaccttttgtttatctgtttattmattgacagacacttgggttgatttcatcttttggctattgtgaataatgctgcagtgaatrtggatgtgcaaatatccctttgagaccccgatttcagttctttggggcttatgccaataagtacgattgcttcatcaaatggtaattktgttgttcattttttgaggaaccgctatattgttttccatactggctataccatctcatgttcccatcagcagtgtacaaatgtcccaacttctctacttccccaccaacatttattttctttttttttttttttgagatgaagtctccctctgtcgcccaggctggaatgcagtggcacagcctcagcttactgcaacctctgcctcctgagttcaactgattctcctggctcagcctccagtagctgagattataggcgcacaccaccatgcccggctaatttttgtattttcagtagagacgggttttgccacgttggccaggctggtcttgaactcscgacctcaggtgattcatttgccttggcctcccaaattgctgggattacaagtgtgagccaccatgctcggccttttctgtttttttgatagtggccatcctaagggatgtgaggtgatagcagtgtagtttcatttgcatttctctaatgattagtgatattgagcatctttacgtgtgcttcttggccatttgtatattttctttgaaggaatgtctattcaagtcctttgcctttttttttttttgaaacagggtcttacttggtcacccaggctgcagtacagtggcacaatcatagctcactgcagcctcgaacttctgggctccagtgatcctgctgccttagccacccgagtaactgggactgcaggtgctcaccatcataccttgctaactttgttttgttttgtttttttcgctgtctcttacagaaaggacttactaagttaaaaaaaaatttttttttatagagattggatcttgctatgtctcccaggctggtcttgaactcctgtttgcctgttttttagttgggttatttgttgttgttttgtaggggttctttatatattctggatattaacctttttttttttttttttttttttttgagatggagttttgctcctgttgtacaggctggagtgtaatggctcaatctcggctcactgcagtctccacctcccgggttcaagcaattctcctgcttcagcctcctgagtagctgggattacaggcatgcgccaccatgcccggctaatttttgtgcttttagtagagacagggtttcaccatgttggccaggctggtcttgaactcctgacctcaggtgatctacccgcctcggcctcccaaagtgctgggattataggtgtgagacactgcgcccggccatgatattaacctcttatcagatctatgatttgaaaatatcttctcccacttcatagattgccttttcactttgtcgattgtttcttttgatgcctgaattttttttttttttttaattttgagatggagtttcactcttgtcacccaggctggagtgcaatggcgcaatcttggctcactgcaacctccacctcccgggttcaagcaattctcctgcctcagcctcccaagaagctggcacccaccaccacgcccagctggcccgattgatttttaatagttaaaccaactttgcattcttggaataagttcatcctggccataacatatttatcrtttttaaatattactggattgagctggcaaatattttaagatctttgcatttgtgttcatgtgtaaaattggccaaatccttgtcacatttgtgtatcaagattatgctgatttctggccaggcgyggtggatcacgcctgtaattccagcactttgggaggccgaggsggtcggattatgaggtcaggagatggagaccatcctggccaacatggtgaaaccccgtctctactaaatatgcaaaaattagctgggcgtggtggcgcactcctgtcatcccagctacccgggaggttgaggcaagagaatcgtttgaacttgggaagtggaggttgcagtgaggtgagatcgtaccactgcactccagcctggcaacagagtgaggctctgtctcaaaaaaaaaaaaaaaaaaaaaagattatgctgatttctgtgaattgcttgagcccaggaggcagaggttgtagtaagctgagtgcaccactgcagtccagcctgagcgacagagcacaactctgtctcaaaaaaaaaaaaaattatgctgccctctttagcttgggaattattccctctttttctagtctgtggagacrgagggtttaagatcaatatctggctgggtgcggtggctcactcctgtaatctcagcactttgggtggccaaggtgggcagatcacctgaggtcaggagttcaagaccagcctggccaacatggcaaaaccctgtctctactaaaaatacacaaaaattcgccaagcatggtagcaggtacctgtaatcccagctactcgggaggctgaggcaggagaattgcttgaacccaggaggcagaggttgcagtgagccaagattgtgccactgcactccagcctgggcaacagcatgggactctgtctcaaaaaaaaaaaaaaaaaaggaaggaaagatcaatatctcttcctcagccaggtccggtggctcatgactgttgggaggccgaggcaggcggatcacttgaagtcaggagttcgagaccagcctggycaacatgatgaaactccatctctcctaaaaatacataacttagctaagcgtggtggcgtgagcctgtaatcccaggtacttgggaagctgaggctggagaattgtttaaacccaggaggcggaggttgcagtgacctgagatggcaccattgcactccagcctgggctacagagtgagactccatctcaaaaaaaaaaaaaaaaaaaagaaatatctatctatctatctatctatctatctatctatctatctatctatctatcttcctctttcttcatcttctttttcccttcctgaacagttcaaaccaaaagtcattaggtaggatcaagcaagatagatgtttacgtagtgggaaggctacagtgctggaagtgccagatgctggggcccctgaagctgaggtgaatgtcattacaggtggcaggtggcagctcagtacatagagactgggcccaaacaagatcagaagggcatccatgtaggcaggggtgaagagtagaggaggccgggcatggaatagtgaagtctgaagcggggttgaggatgctgaaccacagggaggcctagagtggggtggcggagtcaagtggggtgagcagggcttttgcatggagaggggcggccgtggcgcctgatgtgggcaaggaagttgtgtctgcatggttgagggagtggagagagggaagagggtgattgtgccctcgggagggtaaaagagtccaagcatcctaaggaagacgtgcatttggggagtgtgtggcagcaatagtggaagactggttacatacaaggagattaatcaaatatgtaagtatattgagtaaaatgggaaccacatttttcactgtcaaagaagggaattataaacatggaaagagagaaactcraatcaactctgtggtgttgactttgaattgaagacattgatacaaatttaaggttttcagtatacaaagtaagacagttgtgaagcaatctgattgcagattccttttacatttttattaccttaatcttttataagtatctcaccctatgcttaatttgatggctcttcttttttttttttttttttcttcttcctaatagagacagggtcttgctctgccacccaggctggaatgcagtggcaggatcatagctaactacagccttgaactcctgggctcaagtcaccatcccacctcagcctctcgaatagctatgagcacaggtgtssaccatcactcccagctaatttttaataattttttatagaggctggacccagtgggtcatgcctgtaacagcactttgggacgttgaggtggaaggattgcttgagcccaggaatttgagacyggcctgagttacatagtgagaccctgtctctaaaaaaaaaaaaaaaaaaaaattggtgacacacacctatagcctatagcaccagctacttgggaggctgaggcgggaggattgcttgagcccaggaggttggggctacgctgagccaggattgcaccactgcatcaaggttttgaactcctggccttaagcgattctcctgccccagcccctcaaaatactgggattatagatgtgagctactgtgcccagccaatagctattatttttgcaactcattatcaagttcttccaaagctttcaacacggcttttatagtagtaataatggcctttgtttttgcatgtatttcatcaatttacatgcttaattaaatttggtgttaattgcaataaaagatacaattggaataaacaggtttgagaacaactacaaccaacccttggtttggtaagcatagaactcaactggagggagccgaagattgtcatactaccagcaagcatttggcagaccatgagcattagaatgaccgtgaggttagaatgttttatagagggaagggaatgtgccagttagtatgttgtgatagctaagtggttgttgcatagaagaacttgtacaggtctgtgaggctgggatagctgcagcgtaaagaagaagtggaaaaggtggagaaaggcggacaagtggagaactttacatcttggggatgtaaagttcttaaaacagtgcctgactgggcgcagtggctcacgcctgtaatcccagcactttgggaagccgaggcaggccaatcacctgaggtcaggagttcgagaccagcctgaccaacatggtgaaacctgtctttactaaaaatacaaaaattagctgggtgtgatggtgtgggcatgtaatcccagctactcaggaggctgaggcaggaggatcactggaatccaggaggtggaggctgcagtgagctgaggttgtgccaccgcacttcagcctgggcgacagagcaagccttcwtctcaaaaaaaaaaaaaaaaaaaaaaaaacacacaaagaaaatccccccaaaaaaccagcgcctagtacatagtaagcacttaataaggttaagccattgatattctcatgattattttcatcatcattttcwkgaatgtttggaagaataggaaggggcacagatctgactcctgccctcctaactcagccactgctctgagctgaagctcttctaaagagagcactgtgggaataacaaattagggcacatccatgtaatggaatacctcagcaataaaatgagatgagctcttgatacagcaaactcagatgaatctcagaggcatgatgagtgaaatgaaacaagacagtctcaaaaggttgcatactgcctaattcatttacatgacattctatttttaattttattttattttatttttagagacagggtcttgctctgtcacccacgctagagtgcagtgattcgatcgcaactcactgcagcctcgacctccaggcttccgtcatcttcccacctcagccttctgagtagctagaaccacatgcacctaccaccatgtctaaattttttktgtgtgtgtagagatggggtctccctatattgcttaggctggtcttgaactcctggcctcaagcaatccccccgcctcagtctccccaggtgttgggattactgtgctcggtctataggacattctatgagggcaaaacaatagtgatggagaacagatcagccaggggctgggggcgaggggagggtgtgattacaatgggataccacgatggagtttttgggctgttgcaaatgttctgcatcctgatttgggtggtggttatttaagtctatacatatgttaaaattcagagaactttatatcccaaatttgctatatgttaattaaaaaaaaaagtaaaaataaagccttaagaaatgaagggaggcggggcacggtggctcacgcctgtaatcccagcactttgggaggccaagggtggcggattacctgagggcaggagttccagaccagcctggccaacatggtgaaaccctgtctctactaaaaatatacaatttagccatgcgtggtggtgggcacctgtaatcccagctgcttgggaggctgaggcaggagaatcgcttgaacctggaaggcagaggttgcagtgagccgaggtcgtgacagagcaggactccatctcaaaaacataaaaataaaaataaaaataaaaaaaagaaagaaatgaaggggccagacaaagcggctcatgcctgtaatcttagcactttgggaagccgtggcagggggatcgcttgagcttaggagttcaagaccagcytgggcaacgtgacaaaaccccatcttaaaaaaaaaaaatasaaaaattagctgggcatggtggcacgcacttgggaggctgaggtgggaggatcgcttgagcccaggagattgaggctgcagtgagccgtgtttgtgccactgcacttcagcctaagtgacagagaaagaccctatttcaaaggaaaagaaaaagaagtgaaggccctgtagagagcgtcctagtgtctaagctgacctggccccaagcgctgctcgaggggtgcttctgtgacggcgcagcatgtgtgcccaggcctggttcctcacggccaggcccatcatcactcactggctttttccttcctcgtgttagattggagctggagggagcatcactgggctgaagtttaaccctctcaataccaaccagttttacgcctcctcaatggagggaacaactaggctgcaagactttaaaggcaacattctacgagtttttgccagctcagacaccatcaagtgagtagtttaactagcaggggaaagggcttctaagcttaggtgtagttccggcaagagcatccagatcccatttccttaacccaacctgrcccagggaagaaaggaaagatgtcagccactttccgcccttctttctctttctcaaactgctccttggctgccctcactttggtccaggtgggttactgctttgggaaggtgttctggagcctcagctcttctgtaagtcatacctgtattagactggaccttgaccctcactagataagccagcatggcgtggacccagaaagccacctagagaatggagcaacagctcagaacttgagactgaatgccctgcactcactgtggtgtaatgacctgacctgttcctgggtggaagcttatatggatggaatcttttccataaagtgctctggacttcccaagagaaagtggctggagaaattacagaatgcggccgggtgcagtggctcatgcttgaaatcccagcactttgggaggccaaggtgggtggatcacctgaggtcaggagttcgagaccagcctggccaacatggtgaaacccccatctctactaacaatacaaaaaattagctgggcgtggtggtaggcccctgtaattcccagctacttgggaggctgaagcaagagaatcgcttgaacccaggaggcagaggttgcagtgagccgagatggcgccattgcactccatcctgggcaacaagagcgaaaatctatctcaaaaaaaaaaaaaaaaattacagaatactcgtcactttgatttccagctagagccgtgactctgactgctccctgaggaattaagtgagggtgctggggtgtaactagcattggattggatcctgggctgtcccgcagggatgaggagtgcatgcgcacgcaaatcagcaggcaattggatagacaaggctccaggctactcttccgcaagaaatcttcctgcttgaagatattcataggggatggcaaaaggcagtgtagcatggatttgagagtttgagagaaaaactgtgagctgagctcttctggctgaatagcaggatccctgaagcacccycctagtcagcctcccagtccagtggtttgagggaccagaagagctcctggttgtgttttttcccccagtgttcagaagggggcagaagtgcttttctagccagctctgaggaacagggccaggcaatccctctttggcttgtgtctcctttggcctaaagggtgaagagtgaaaggagagagcagtaaaggaggcttgctcagaacccggggtgtggggggcaggcgtgcctcagggcttgctttatggtataagctttgtctgcttcagggacttttaggagctggggatcctgggcccagccrtaaccagacagatttctgagccccattatcccatcccctctgtctggacggtagagcagtctgaatgttcctcactaggaatccayggcaagacagttattcattcattcaacaaatatttattgaatgcccgctgtgggttagtcaccggagcggcaacagtgagtaaataggactatctctgtccccaagaatcttacaacacagtctctccctccagcatctggttttgtagcctggatgtgtctgctagtagccgaatggtggtcacaggagacaacgtggggaacgtgatcctgctgaacatggacggcaaagaggtgcgttctccgaggtcctgcctttccctccctcacccccacctcggttctgtgtccccacctgaaccgagctcttctctgcagctttggaatctcagaatgcacaaaaagaaagtgacgcatgtggccctgaacccatgctgtgattggttcctggccacagcctccgtagatcaaacagtgaaaatttgggacctgcrccaggttagagggaaagccagcttcctctactcgctgccgcacaggcatcctgtcaacgcaggtgtgatatcccagacctcatctctcctgcagaccctgcctgtctgaccactgctggggttttccctcagtgtggaagccactacgtcaaacctttacccctgatagcgtctgccaagctgatgtctgggaacctttgtggctgtggctgtccccatcagctgctgagtttccagaatttttttgttgttgttcacagcccagattcacctcttcctttccgytcctgtctagagaggagtggragggagagtacccctgcaggagaaggcctgcaaggccaggaccacagagggcttgtggttccttcagctcaggggcttttcactttgccagcttgtttcagtcccgatggagcccggctcctgaccacggaccagaagagcgagatcygagtttactctgcttcccagtgggactgccccctgggcctgatcccgcaccctcaccgtcacttccagcacctcacacccatcaaggtgagtggcggtgggaaggagctcgcagaaggaggctgtgatcatgaggccggagcaggtctgcccacagtggggaagggctgatgtggtaagcctgccaccccagatcgctcctggcccgagcacagagcatctcttacccattggctctctctcttccttttatcccacttctgccatcccatatggttgagttttctgtctcgctgataagatatttttctgagttttttcagcccagctctgatctcactgtgagaattttctaagatcctgaccctctgttctgtcttctcagcttcagttacctgtgtacagttgacccacaaaccttcattttttatttttttattattttttttaaggcagggtctcgctctgtcacccaggtgggagtacagtggggcaagcatggttcattacagccttgatctcccaggctcaagcgatcctcctgcctcactttttttttttttgtagagacagggtattcttgtgttacccaggctgatccytttttttttttttttttttttttcttgaaacggtcttgctctgtcacccaggctggagtgcagtggcacaaacatagctcactgcagcctcaacctcctgggttcaagcaatccttccgccttagcctcggaagtagattggactacaggtatgcgccaccatacccagctaatttttttattttttatagagatggggttttgccatgttgcccaagctggtcttgaactcctaggttgaagccatcccccaaccttggcctcccaaagtgctaggattacaggcatgagccactgcgcctggcaactttgccttcttagtttgtcttgcaggtttcagtgcttctaataataaaaataagtcttttattttcccaccttttctcaggctcttgttaatagcttctctatcattagtccccaacactaatagctttcaagtcctttgatgcctttttgcctaagcccccatgcagactgagctctgctagttctgcattcttttccaaaactacagatcctcttcagatcttcaggttttatgcctatacttctctggtcagttcagaatagtggtggggagcgccagtttccagcagccagaccccccgggttagaatccttgggcaaattacttatattttggatctgtttcctcatctgcaaaaagggaatactagtctctaactgatagggttgttgtgaagatgagtcagtatacttaaagcacttggccccatgcccagcacctggtaagtactggtaagtattcaataaatgatgattgaatattgagtggcccccacgtacctcaatcacatccaagctcttaataaataatgtcaagaatccttccccagttggtgttcctgttaatccatcagtgttcccgataatccatctgtctgcatgtcccagtttgtatctagccaggtgtcgtaagtcattacagcttcctgtgtgtgatttgtgacttatttctaagccttcgcatgtactatttcttccttcctgctaaccatgtctttcttccttcaaaacttccttgagaagtttaggaaaatcccatccaattctgccattttaataactgccagatttgtttttagtggggtgatctggggaatgtgggtttccttctcttttttagccaytagcaattttacactcagctcttagttattcgtgttgatggagacaggatgacagtggggctcctccagaactcaagtcctgttagggtttggtcaccagaggctttttctgctttgttgtaggcctcttaggtcagtatctgggtcaggctgatgttaaaacgtttaccagttggtatgatcttaggaaatgcaaatgagggagaaggcctgaaggtgccytaagggccagggaggccagctagggattaaaaatgtgcaatggcagaggcacacacaacctaaaaccattcttgtagttttctgtaagacttatctccattattaggttggcttgttactggcaaatactacttttttttttttttttttgagagtcttgctctgtcacctaggctggagtgcagtgacatgatcttcactcactgcaacctccgcctcccgggttcaagtgattcccctgcctcagcctcccaagtagctgggactacaggcatgtaccaccacgcccagctaattttttttttggtatttttagtagggacggggtttcaccatgttagccaggatggtctcgatctcctgacctcgtgatccgcctgcctcagcctcccaaagtgttgagattacagstgtgagccactgcactcagcccaaagaatacttttgatgttcctctttgttcatatttgtttttgatgtcccccttgatcatgttctgtgtttaccctcatggccggcctctccatctcctaggcagcctggcatcctcgctacaacctcatygttgtgggccgatacccagatcctaatttcaaaagttgtaccccttatgaattgaggacgatcgacgtgttcgatggaaactcagggaagatgatgtgtcagctctatgacccagaatcttctggcatcagttcggtgaggcttgggtcctcaaataatgatgggaggaagcagggattcaacctaccttattgaccaaaagtgaccagaaatcaggtgtctctgctaataccttcaccctctcctcatgytgacactcttgtctctgcagcttaatgaattcaatcccatgggggacacgctggcctctgcaatgggtgagtaggaggagaatgtctctgacttgccaagtccgatcctacttcccaaggttcagtgcgggccagcctcagccccgccctgccacattcaccccagggcagtggcccacgaagaagatggctgggagacagtggtctctatagccaaggccctccattcctctggctttgtcttggtcatgcaatgcctggctactgtccagtttcctagtatttcttttttttttttgagacggagtctcgctctgtccccccgggctggagtgcagtggcgtgatcttggctcaatgcaagctccgcctcctgggttcacgccattctcctgcctcaacctctcgagtagctaggactacaggtgcccgctaccacgcccagctaattttttgtatttttagtagagacagsgtttcaccgtgttagccaggatggtctcggtctcctgacctcgtgatccgcccacctcagcctcccaaagtgctgggattacagacttgagccaccgcgcccggccttcctagtatttctttaccaaatygtaggtttgcgggccagccccaggctctgagagattggtaacagaargtgtaagtcagactggtctcactcttcctaggttaccacattctcatctggagccaggaggaagccaggacacggaagtgagagacactaaagaaggtgtgggccagacaaggccttggagcccacacatgggatcaagtcctgcaagcagaggtggygatttgttaaagggccaaaagtatccaaggttagggttggagcaggggtgctgggacctggggcactgtgggactgggacacttttatgttaatgctctggacttgcctccagagactgctccagagttggtgacacagctgtcccaagggcccctctgtatctagcctggaaccaaggttatcttggaactaaatgacttttctcctctcagtgggtggtagcagagggatcaagcagttatttgatttgtgctcacttttgatatggccaataaaaccataccgactgagcttctgcgtggatcttccagaagtgacctggtcagagagcttcttgcgtctcagaaatgaagaaaaagcacaggaaacagcactatcagtccaataggaaacagcactattcattctctgggagctgccccagccctattctgggccacagtctagaactttcttttccagctcacaacctgcatgtagctcaggtccctggagaccccagcccagctgagggagagcagtttcctgattcgtgtgacaagcaactcccttcccaccactcccyactccctcccaagtacagacaaccttcygtcctgctccagttgaaggggtgacaacgattcctgaagcattctgtctgagtctaatggtggctctagccagacacagggaaatgtggctggctggctgttgggtgatccagttccttgggagccaatgtttgtacccctggtattagctgtttttcccactaaaataagcactgagaggcaagaccrtgtccctctgagctatttgccgaagacttcaggctggaggaaaaagaacagggcttgatagaagtgcaaggtggatccagcaccaactctgccattttctaatcctaggtcctgagtgaacactgactgccagtttacatctcaggtgtgtagggagcgtggaggaggcaaatcctgtttggagaaagccagtgtccaacacagcacttggtaaacatcaggcatgggaatgctgagtgacaggcaccatgggccacgctgagccccactcgctcatctggctggggtcatcagagggaggcccaacccaggatctcctgtccatgggctggggagcagcaacagtcaggagcgagggcccagcccacctcccctaggaggtggagggaagggggctgagtggttgtcaggcgtggtcctccccatctgcgacgtggcggtagccaggaggctgggcctgcatccggaagaggacggtgaggagcagcactatgaggaggaagaggatggagccacatacagccaaggccacaatcacctctgggcatgggggaggcaagagaaaggtcatgtcagcgttccatcatatgccagctactgttctgacatataggagatacacagaggtggccaagacagagtccctgctctcatggagtttacattctaggagaggggatgtaataaataagcaaatgggctggtcacagtggctcacgcctataatcccaacactttggaaggttgaggtgggcagatcacctgaggtcaggagttggagaccagcctggccatcatggtgaaaacccatctctactaaataaagttggccgtgcgcagtggctcacacctgtaatcccagcactttgggaggccgaggtgggtggatcacctgaggtcaagagtttgagaccagcctggccaacgtggtgaaatgccgtctctactaaaaatacaaaaaattagctgggcatggtggtgtgcacctgtaatcccaactactcgggaggctgaggcaggagaattgcttgaacctgggagacagaggttgcagtgagccgagatcacgccactgcactccagcctgggtgacaggatgagacaccgtctcaaaaaaaaaaaaaaaattaggagtgacaggtcagtgacgaatgtgatacagagagacaaagcaaagtaggtcagcagggaaggcatcattgagaaagtgagaagtttaacagagacctggagtcaatgaatgacatacaacaatctgagaagagtatcacagggcagaggagacgaagggcaaaaggcccagatgtggggataagcctggcacatgctagtatcatcaagagtcagtctcaccagagtagagtaagcaaggggcatgtaggagatggggcaggagaccagatggagtagggcctagaaggccatggtgaagaacttggattttattctatatgtgatgggaagccactagaaaattctgagaggacagtagtatgaactggtttacattttttaaaagttaactcagtcggccgcggtggctcatgcctgtaatcccagcaatttgggagactaaggcgggcggatcacctgaggttgggagtttgagaccagcctgaccaacatggagaaacctcatctctactgaaaatacaaaatcagctgggcatggtgatgcatgcctgtaatcccagctactcgggaggctgaggcaggagaatcacttacacccgggaggcggaggttgcagtgagccgagattgcgccactgcactccagcctgggcaacaagagcaaaactccatctcaaaaaaataaaaaaagttaactctgctgtgttgaaagactggtagggacaagaatagaaccagaaagaactaggaagcttttcattcggtcaggcaagagctgacggtagattggactgcggaggcaagagcacatattaatatttgaaaggttgagctgatctggcagtgggctggatgaggggtatgagaaacggtatgcagaatgaccccaagggttatactgtgccactaggtgactcgtggcattgactgaaacaaggaagcctggaagaagagcagctgtggaaggaaaagcatctggttttagacattgcaactttgagatgccttacttaacatgcatgtagagatctcaagttggcagctggatatgagtctctagctcagagaagaggttgtgaatctgtgagtcagggcgtaaggacagaagtgggcatggagatgggcataaagtcatgaggctgcatgagatcacttgggagtgtgcacagatggggaaagctccagggatgagtcctgggtcatccgttctttagtgaggaagggacgcctgaaagtcagaagccaagaaagtgtttcaggaaggggtgaccaattatgtaatgctgctgagaggtgagagaagctaagaattagtcactggctttggtaggaggtgactggtcaccagacaagtatggcttcagggtagtggaaggtgacacaagactgtctaatgtgagtctaagagaacaagtggtgaggaagcagagccagattctaggcagctctttcaaggattccattctgagagggaagaggctggtggctggggaagaggtggctctcagaggtcatggatgggcttttgggagggaagtgatccagtagagaagcagaggcgtcagagctccttgcagagatgaggagagaacccaagtgcgggtggagaggccaccctaagcggtggcttcccccaggaagtaacctggtggtgggagaacgagccaattctctcttggctcttattttctcggtgatacaagtgagacatcacccgagggtgagaagtggggagaaggtataaagcagtctggggtcggggagggaactcctagcaaatgcagtcaaatggctggaagtgcgacagctcttgagatgcgtggatgtgaactgcaggctggtctagggcatgactagcaaggaggccggtgacagctcacctgtgtctgcaggaccgcttgccagctggcactcctgctgccaatccttgggcacgacgggctctgtgaggcgaaggaagtcctgcagtgggcagcggtgagggcagccaggcaggctgagcggccagggggccttgtcactctcgttccgaaagtacatctccactgagaaattcctgagggtcgacaggaggcaacatgggagctgctcagcctgcccatcatggggtccttgggctgccccgagccacctccygagggcyyccctccagaggacactgctagctccactcacccaraatcttcctggtacagttcaaatatgtggcaggaggcgtagggggcttgttcaccattgtagacatccagtgccatttgcagggcaaccagggtagtgtcgtgctgygggggagaggggctgcccgtcagcattgttccccacacccgcaggaaccgaacagagaagaaatccagctccttgcctgacacagcacgctagggagcgcaggcactcaccgcagagtaaaccagcagcttggggagctgggaggtggtcgccattagggtcaggttcttccttatctgagccagcaggactcctgaaggagaaaagtccccggtgttgctggctacagccacctctgccttctaattagacctatctgtgctcctttcaccctctgccaggcctgggcctcatcacctacacggagaactctttagtgtcatagggaccatgtaagaactctgtggcacccctcctctctaagaactgtcaaatgtacagaaggaagcaagacaaaacaagatatctgcctatatttcaacacggatgtagaaacctgcctgtgtttacagaagcacttcagtttgaaacaaatgtaaacttaagattgcttcagagtacacagcgggtgggtgcatgcccgggtaactaccatatgctctgaaaagtgagatgtcaaaaaggtgtgacagcaggcatgcccttaggtgctcaaataaggaagctggcatgtgtgttactctcagccttctcaaaatggcccccagtggttctcttggggcagctattcatttaggagagggagggtcttctgatgtgggcgaaacttaagaacatgaatggcagggctgggcgtggtggctcatgtgtgtaatcccagcactttggaaggctgaggcgggcagatcaccagaggtcaggagtttgagaccagcctggccaacatagtgaaaccccatctctactaaaaatataaaaattagttgggcgtggtggcaggcacttgtagtcccagctacttaggaggctgaggcgggagaatcgcttgaacctgggaggtggaggctgcaatgagccgagatcgtgccactctactatagcctgggtgacagagcaagactctgtctcaaaataaataggctgggtatggcggctcatgcctgtaatcccagcactttgggaggccaaggtgggtggatcacctgaggtcaggagttcaagaccagcttggccaacatggtgaaaccctgtttctactaaaaatacaaaaattagctgggcatggtggctgaggtcaggagtttgagtccagcctggcgaacatggtgaaaccccgttcctactaaaaatacaaaagttagccaggcatgatggcatgtgcctgcaatcccagctactcagaagactgaggcaggagaattgcttgaactcaggaggcagaggttgtagtgagccaagatcgagccattgcactccagcctgggtgacaagagggaaactccatccccccgaaaaaaaataacaatttttttaaaaagaatatgaatggcagaaaaggaagagaggtggggaaatttggtgactagcggcatgaggagggggatttggttttgaaagagcagggagtgtttcagtagagagggaagtgtgtgagaagcccccacagcagatttttaacgccttagggtcctgaggagtagagtgacacgctgtccttgtcactcacccccctgaagccgggccttctccgcctgctggtagattccgaagaggaagcggaagctgaagtcctttagccggctgagacgctgcatggtttggggtgaggcccagggcggcaggcgcagcccgtgcgtttgctgtgtatcgcagcaggcaggttagcgccccaggcctaggccagcctctccasggggcagctctcttccctagtgggaaggtgcctgtgtgtgtgagggagggagaggggagagaggcagaggggctggaaccagtagacatggcaggcggtgtggatgcttcagggcacaggaaaggaagctcaggcacaaaaagtgagactcagcagaaaggagctctgggtggagagcagcagggactgctgacaattaataaaccatttcccactctgaggatctctgtcacccatgagggaagttcccgtgtttcacaagcacagcctccctggacctccccaggggcgtgacggtatcaggcactgtgttctaccg

SEQ ID NO: 95261 - DNA, 17534 bp, Homo sapiens
  misc_feature (1)...(17534): n = A,T,C or G
catccccctttttatatcggtcccggaagacatagatgctcccgttacagctggcaatcttccagagggatggggcagagctccaggcctcaggaaggcaaagccgggtgaagctgtctagcaagggattgtagcacaccagggagtccccttcagccacgatgaacaccagatctttatgcacagctgcgtgcatgcggcctgcaaagggcagcacatagggcttcacatggcatttgtctgtctctgtgtcaaagcactggatgagtcgggaaggtttggtaaagaagtccagatcattctcctccccccctagtaagtagatgatcccgttgaggttggcaccagcagcccctgacacagccacctctagctgagttgtctctgtccacacattatcacctacgcgataataaatgactgcgttggagagggtatcttgcagtgtcttgccacccagtgaatatatggcatctttcccgggcacagacaccagggtgtgctggagccggtcccgaggcaaaggagcacaccactcccagtcaacggtggcattgttgcacttccacatgcgccgtgggatggaccctcccaccacatacaagtctccaccatgcttgcaggccgcagtgatctggtggcacaaactgttttggccacttacactgatggagtcatcttctgcacagtgcaaggacacagccaacgagtgggtacgagatgactctttcccaatcaggtaaatrtgcacattctccccaatttcctattggcaaaattaaaattatatgacagctgttaaattctaggctaaggctcagctaagacacatatccttaagatcctggccctcacacttgttcctagctttatcatactactctctaattactgtatggcatccaactctcctctagtcactttctttgaggcaatttatgccgggcggagaatctgttgtattcatccttgtagcttttaaaaaactctcataagctagtgcttcagacaaagggtgattaagattgttaacttgatgacagtagttctcaaggaactttgaaagctcatagattggtggtactggggttacaaagacatccttctccccagctcatatcaacttcaagccagagataacttattcaaaaataaataaataaatacaaaaaattaaaaaaacaagagatggccgggcacagtggctcacacctgtcatctcagcactttgggaggccgaggtgggcagatcacctaagctcaagagttcgagaccagcctgaccaatatggtgaaaccctgtctctactaaaaatacaaaaattagccgggcgtggtggtatgcacctgtagtcccagctactcgggaggctgagacagaagaattgcttgaatttgagaggcggaggttgcagtgagctgagatcatgccattgcactccagcctgggagacggagtaagactctgtctcaaaaacaaacaaacaaaacaaaacaaaaaacagagacgaccattcataatctggccatcaaaaagaggccaggttaggccaggcgcattggctcatgcctgtaatcccaagactctgggaggccaaggtgggtggatcacctgaggtcaggagttcgagaccagtttggccaacatggtgaaacccatctctactaaaaatacaacaattatctgggcgtggtcgtgggcgcctgaaatctcagctactcgggaggctgaggcagaaaaatcgcttgaacccaggaggtagaggttgcagtgagccgagatcgcaccatcgcactctagcctgggcaacaagagcgaaactccatctctctctctctagcctgggcaacaagagcgaaactccatctctctctctcacacacagacacacaaagaggccaggttaggccaggcacagtggctcacacctgtaatcccagcattttgggaggcagaggcaggcagactatctgagatcaggagttccagaccagcctggccaacatggtgaaaccccatctctactaaaaatacaaaaattaggcgtggtggcagcacctgtaatcccacctacttgggaggctaaggcaggaaaatagcctgaaactgggaagtggaggttgcagcgagctgagattgcaccactgcattccagcctgggcaacaaagtgagaatccgtcttaaaaaaaaaaaaaaaaaggccgggcgcgggggctcatgcctgtaatcccagcactttgggaggcggaggcgggcggatcacgaggtcaggagatcgagagcatcctggctaacacgatgaaaccctgtctctactaaaaatacaaaaattagccgggcgtggtggtgggcacctgtagtcccagctactagggaggctgaggcaggagaatggtgtgaacccgggaggcggagcttgcagtgagccgagattgcgccactgcactccagcctggacgacagagcaagactccatctcaaaaaaaaaaaaaaagaggccaaattaactgatggcaagaatgcatggagagtatgcagtctcaacaattaagagatttgccttaccttcaagcttgtcctgagtgactctgcaaaagcctctctttcctctttattaaagttgatccaggcttctattgcctctgttgggttctgagaacacggaactccatctgtgagagccagaggaaaggcatggtcaatgacaatccgaaagagaaattcagagtaagggactttaaagatgtgaaccactttattagactactgctgggcatgtgtatatgtgtacatgcatacatacacatatacatgaaattaacctaaaattgctttttttttttttttttgaggcagggtctcaccctgtcgctcaggcagaagtgcaatggcgcaatcaccatcaccatagcctcaacctcctgggctcaagcaatcctgtttcagcctcccaagtagctgggactacaggtgtgcaccaccacgcctggctaattttcttattttctgtatagacaaggtctgactgttgtccaggctggtctcaaactcctgccatcaagggatcctccctccttggcctcccaaagtgctgggattacaggcatgagccaccatgcctggcgggtcttgctttttttttttttttttttttttttgagatggagtcttgcactgttgcccaggctggagtgcagtggcgtgatctcggctcactgcaagctccacctcccgggttcacgccattctcctgcctcagcctcccgagtagctgggtctacaggcgcctgccaccatgcccaggtaattttttgtactttcaccatgttagccaggatggccttgatctgacctcgtgatctgcccacctcggcctcccaaagtgctgggattacaggcgtgagccactgcgcctggcccgtaccttgctcttttttaaagatagtctcatgtgttacatgagccctcaaaaagttgggtaaagactcataaccgttcctctccatggaaatctttagtaaaaggtaaaagatttatacaatctgaagagaaaccagagtatgtgccttgcttttttaaaatcaaaatggatgactcgatattttcccatgtgccatggaagcaacctactaagctacagagctcacaccatttttttttttttttttgagatggaatcttgctctgtcgcccaggctggagtgcggtggcgtgatcttggctcactgcaacctctgcctccgggttcaagtgattctcctgcctcagccttcccaagtagctgagactacaggtgcaagccaccatgcccagctaatttttgtattttttgtggagacgggatttcgccatgttggccagggtggtcttgaactcctgacctcaggtgatccacccacctcggcctcccaaagtgttgggattacaggtgtgagccaccatgcctggccaacctcacaccttaagtatggctatatctcacttgcaaggttaggattgtttcctaacgttggcccatcactaaaaaagtttttagtcttagatatcttgccccatcaccaatttacataggtaattagacccactgggacatacgaagtacaggataaattagagtataatacaaatcactcctcactactctgtgtggttaaatgttgtgctttaattttcctgacttcttcctctaacgcactgtgtctctgacagcaattacactgaatctcacctcaatctttctcagcaggttatctcagtaagaatgcaggaataataatgtaaactaacaccaggaagcttgagggttcttttctcctaaactagaacattcactgaacatcatagccaagtaactgggtatggtgtgtcccctccctaaacttacccgagatgatatctgtgagtaagcggtggggcaagtggagaaattcctctgtattctgcagctgggccaggtgggtcttggcacagtgcttggcagccgtatagagctcaggatcactgtgccgatctgccagccacatcacctgaaggcagtttcccacttgcactgtgcgggccaaaaaccgagagcattcctcaaagagagatgtcagctgatacatgtctgacacctcataaatttcctgcaactcctcagctcgaagtttcacagtcccatggtagatataatcaaccaggagctggaaaacagactcgctgacatcctgcagcacaatcacccggttgtgggcctccttcaggttggaagtgaacatggatcggaagaagcagctctgagctgagaggaccagccgatggagctgaaactcccggccttccaccgaaatggtgacatcagcaaagagctcctcctctagacacagtttcatgatgccttgagccacacggcctgaatgtgaccgatctttgaaagtgtagttcacaaagtagttctcatccatggatgctccaggctcctctggtgattccatgctagccaacttctctctctgccagctgtctgcaaagcaacaccatcttgagtaacctgaggaattcacagccatagtctgtgaatccaactgtccaactcagggagggaaaaggaagaagtgagagcaaagtgggtccagattggccttagtcctggccctrtccatgatgtccctgacgctatcctttaaccaaatctgggttcgttatccccagtggcgcccctccgctaatgatataaataaaagttccaactctgggtgttttcctgagaaaacacggaataattcctttccataatgttaacaaaagacttgggatttaggtcaatatatgaaagcaaagggctgggagaggcctgtgatcgtaaaagccttactaaccaaataactggggcataaaactagtgaagctcaggggcagtagaatcagacaaaaaggacccctggccccggcctagtggccaggtcctctccttcccagcgcatggagttaagacgctccatatgaagcctagcctgggatatccgtgggtcttacatttgctctcttctgagctgcttcccccacacttccccgctcgctcgaaagactccctatggctgcgtcccagaacttgartccatccgcccccaggccggggcactgggaggcccatcaccctgtgcaatgtccccgctccaccttgagtcgtcttggaaacggtcgccagggaaaccgttcttcccgctcaggcccgcccgccctcgtcaaaagcttggctcagagagcgggggaggggtgtgtagcgtagaacccagaacgcccgccccctcccctcctctcacccgcctggttcttcagcgtcctcgccttctctctaggctctgccacaaggagctaggaycacgctcacctcacgatttccctacctgcctgtctcgctttctcacctgcgttccctcctttcatcccggagcccggaacctccgcttccggctccacgtccgcccggaagaagatctgctgcacacttccgtttccggtccgtgcccttggggctccgtgtcctgctgtctttccgtccgctgcctagtctgcatctgagtaacatggcggcggcggcggtagccaggctgtggtggcgcgggatcttgggggcctcggcgctgaccaggggtgagcacgggcagccagctgagaccggggtcaggcgcagcggcgygcccagtgyagagagctcctcagggctcatcccgcgcgtctgtgccttttatctccctgtgcagggactgggcgaccctccgttctgttgctgccggtgaggcgggagagcgccggggccgacacgcgccgtgagtatgtgcgggcagcgctcttctctgaactatcggcggggccccttagatgcctgtccttgccctaggatgcccttccctacgtcctcctggcaaatcttggagatstgacttgcagtggtcttcaccctgcatgcagaatcgagccctccctgtgcccttaggcctgttayggccctgattgttccttgtccatttcaatcatcccctttttgtctgattaaactgtcagctctttgaaagcaagcaatataacctttaggcctcagagccctgtaataatagtacctagcgttaattgagtgcttaatgtgtgcctggaacctcgctaagcgttttagtgaatgatcttatttcgtcctcacaacagccttatggggtagatagcatcttactcttcttactatagatcaggaaacagtccaaagaattaaactgcccagggtcaaagacctagtgaatgacaaagtaggcctgcctgctgccagaggcagaaacacctaaccattattctgtagcttgtgatgtgtgattgctcagtggtttagggttgcatgaatgagtatgtacatattatgttacagtcaagatacacggactgggagttaggagacctggcatttctcctttcctgggttttctcattgaacacacacacacacacacacacacacacacacacacacctgggcctcagttttctcattgacacacacacacacacacacacacttttaaggagagagagagtctgtgagggatcttcaagcccttaagttcttagcttgagaacctggtataaacttgcgtgctaaggagctacagagaggcaaaagttcagttcccatyctcaaacagctcttagtctgacaggagaactgagactactgctttagcagaaatgcaggcaatgtgagggaagaactgtggagtaattttgagaagaggtgaacaccccagctgctatagtaagagtctttctgaggaccgtgtagttaaggtggcactttccccaagttttcatcactgtattccctagaaggraaacctttcacatgcacctttctcaaggtgcttcagggagyctttcctggatttgacatcccttacaagcctaagagactgcatgcagggctggcttttgccttctccatttyttttttaaatatgccttttccttccagccactgtcagaccacggaatgatgtggcccacaagcagctctcagcttttggagagtatgtggctgaaatcttgcccaagtatgtccaacaagttcaggtaatacttactaatgttatttgggtctgggtcaagaaagaaccatgttcgcagggcaygtgggagtgggcagacttgtttcaaagaaactacagattcctccatcccaagcttggacttttctctcagcattaaaccaggtgactccagctgaagttagctgttccctcagtagctctttgttccctctcccctcactttcatgtgtgcaggtgtcctgcttcaatgagttagaggtctgtatccatcctgatggcgtcatcccagtgctgactttcctcagggatcacaccaatgcacagttcaaatctctggttgacttgacagcagtggacgtcccaactcggcaaaaccgttttgaggtcagttgggagatctgagaaggttttgggggtaaggatattaatttcagtttgtaacatacaatagaacacagcagttaaactggaacttcagagtcaagtagatctgaagttggatcttggttctgccactaaatggctgtgggacctcagataactcaaatattttgtttaattttttttttttttagacggaatcttgctctgtcgccaggctggagtgcagtggcatgatcttggctcactgcaacctccgtctcccaggttcaagcgattcccctgcctcagccccttgagtagctgggactacaggtgcatgccaccacgcccggctaattttttgtatttttttagtgaagactgggtttcaccatgttggccaggatggtctcaatttcctgacctcgtgatctgcctgccttggcctcccaaagtgctgggattacaggcatgagccaccatgcccggcccttgtttaatctttctgagctttcattttcttaccgggaaaataaatataaagctgtccttatcttatagaatggttrtaaggatccaatgagatagttcaagtaaattgcttgcacacagtgttttcaatacatttagctattaatattttactgattatctactgtttgccagactctgggatggagagagwaataacatgaagtatttgtcctccaggagtcccctacactctagtgaaggagaaagacacctaaacagcttactgtagtaacatataatacaaaggatattagagggatgctttaagaaagcaggaggggcacttggccctgtctgggaggcttctttgaaaagagagaatgtttgtgctgaatctaaaatatgagtaggagaccaggtagccttgtgagatggaccagggaaatattcctgacaaagtgaatagcatgagcaaacacaggcatgctgacatgctaagctacagctgtggcctgggcctttggaagtagttgtaagcataggagaatcttgaggttttgaggttyagaatagaaggcagggtcacagggcagaactctcccaatcagggactcccatctcagccctccagatccttctgttctccctagattgtctacaacctgttgtctctgcgcttcaactcacggatccgtgtgaagacctacacagatgagctgacgcccattgagtctgctgtctctgtgttcaaggcagccaactggtatgaaagggaggtgagttaccggatatggtggacctgcctctgggccacagttgcagaactggttcagactaygggatgcagtgtagccccttccccctgttgttagtcttgatggattggctgtttgaggtggtctctttcctagatctgggacatgtttggagtcttctttgctaaccaccctgatctaagaaggatcctgacagattatggcttcgagggacatcctttccggaaagactttcctctatctggctatgttgaggtaggagccttggaactgggacagcagcctcagggagggacttgcagagaacccaggggatccctgggaatggcaagaaatacggtctgtggattgtggtggtttaagagcatgggccctggattcagatcctagcttcatttttgtaacctggggcaagttacttggtttgactgtaactcagttttctcatcttaaaatggcaataataatagcactttaatagatttgtggctggcattaaataatgtatgtgtaggctcacgcctgtaatcccagcactttgggaagccaagacaggaggagtgcttgagtccaggagttcgagaacagcctaggcaacatggtgaaacctcttctctacaaaaaaatagaaaaattaacggggcatggtggtgcattcctgtggtcctggctgctcaagaggctgaggtgggaggatcgcttgagcctagaaggcggaggttgcagtgagccgagatcacgccactgctctccagcctgggcaacagagtgagaccctgtctctaaataaataaatgatgtatgaagcctgctgtattgtaaaggctcaattgatgctgtgtgtgtgtgtgtgtgtcagggtctcactcttgttacctaggatggagtgcagtggtgcgatcatggctcactgcagtcttgaccgcccaggctcaagtaatcctcccacctctcagccctccgagtagctgggactacaggcatgcaccaacatgcccagcaaatttttgtattttttgtagagacggggtttctccatgttgcccaaactggtctcgaattcctgggctcaagtcatctgcccgcctcagcttctcaaaagtgctgggattacaggtgtgagccaccacacctggccagtgttatccattattgtaatgatcattttaatgatcaaggcagccttgacgacacagtctgtccctaaaacctgaaagtagaggattattttaccctgccctgactctctgggaaggcagtgacggggaagacaccagatgcttagccctcaaaaattacctctgaggtgggaccagtaacgtgaataaagaatttcagtggtgctgcaggttatttgcaggaagatagtgtgtaatattatcactcgtgaattttatagcaaagtaactgtttagaaatgcagagatgtggtgctccagccctgctcttttagttcccagtcactcctgctgtgttagtgctttgcatgctcctatttccctcttgggctacttctgggcagggctatctccctcgcttctccctttcaccccactcctgctatctgcctcacctggtttgcctcttcactctagcacctgatgatccttaccttatccatttgatccccaagtaacaagaaaagctgtgtcaaatgtactrctttagatctggactgtgaatatgccaagggcaccgggcctgaggttgtgtatctgccagtttaggtttactcttttcagccaccgactactccctaatcctgggcaaatgcttaccattaccttgtaagagtgtgtgggtgggtgagcagtcagttcggagctcctgatgtgggagtggtgagcaggggaatctgactggtgctggcagggcatgagaggtatcctacattttggaatcacacactctagctggttgggatgtgatctgacgggtaacacaggtatggatggagacttactgacagaggctgggacaggagtcagtaaccgagaggaatgggctggggaagtcaccaatagccttgtgaaaagtaggctcctgtgtagctataataaggacttccttagtgctcaagcctgccttttgctcctgcagttacgttatgatgatgaagtgaagcgggtggtggcagagccggtggagttggcccaagagttccgcaaatttgacctgaacagcccctgggaggctttcccagtctatcgccaaccccmrgagagtctcaagcttgaagccggagacaagaagcctgatgccaagtagctccagggaacgcatgtggatcctagacagcgccttatctatgattgagtgtccgtgtaaataaattcctacttagacttaccactttgtgtgtgcttgtaatgtggagaagtgatgctttgggggggacacaggcaggcaggggtgtttccctgctctcttagagaggcactactaaaccagggagtctttgatgggtttttttttttttttttgagacagtgtttcgctcttgttgccgaggctggagtacaatggcgtgatctcggctcaccacaacctccgcctcctgggttcaagtaattctcttgcctcagcctcccgagtagctgggattacaggtgtgtgccaccacacctggctaattttgtatttttagtaaagacggggtttctccatattggtcaggctgttcttgaactcctgacctcaggtgatctgtctgcttcggcctcccaaagtgctggaattataggcgtgagccactgtgaccagctcttttatgtttttttgagatggagtctcgctctgtcacccaggctggagtgcagtggtgctgtcgcagctcgctgcaacctccacctcccaggcccaagcggttctcccccctcagcctcccaagaagctgggattacagatgcacgccaccacgcccagctagtttttatagtttttgtagagatgggatttcaccatgttgcccaggctggtctcgaactcctggcctcaaatgatccacactggcctcccaaagtgctgggattataggcgtgagccaccacactcagccggaggtctattttaatgggactaaagagtgtagttgcagacgtggtggcctgcaggcatggatgtatttctgagagggattctggagctgtaactgaaagttctcacagtccacagggttcaggatgggtgtggcatggtagccaatcactcttgggctataggaatctccctggtttctggcctgagctgagaatggtggggttctttttttcttcttcttttttttttttttttgagatggagttttgctattgttgcacaggctggagtgcaatggcatgatcttggttcactgtgaccgccgcctcccgggttcaagcaattctgcctcagcctcccgagtagctgggattacaggcttgcgccaccacgcccggccaattttgtatttttagtagagatggggtttctccatgttggtcaggctggtctcaaactcccgacctcaggtgatctgcccgcctcggcctcccagagtgctgggattacaggcgtgagccaccgcgccaggctggtgggggttttttgagacagggtcttggtctgtcacctaggctagagtgagtacagcagtgtgatcgtggttcactgcagtctagactgcctgggctcaggtgatcctcccacctcagcctcctgagtagctaggaccacaggtgtgtaccaccatacccagctaatttatttgtagagatgagggctcaccatgttgcccaggctggtcttgaactcctgggctcaagccatcctcctgtcttgccctcctaaagtgctgggattacaggcatgagccaccgtgcccgctctgaattaagaatgttgctaggaaacaagaggtcccagggctggggcaaaaaccactcaggagctgcagatttgtctgtctgccaggggacaatacgccctagcccagctgatctgtctgtccagcctgcggcagagtgcctgagaggggagtgcttggctctgcctgtctgtggggccgcccagccagcccaccatgcagttggaagactttgcagctgatgcttttggcagctgaggggctccttggaggctgggctgggccagactgggtgtcggggctggcctcagtcgcaggatattttgagggcgcagacagtaagatggtcttactgcctgagctctttcctaccctttgggagggccaagctacagctatttgctaccaaacacctttttcctattaactaagcataccgcccagctgggcaggaacaggctgagggcctgacaagcagggagccaggctcctgccaacaaccaaagattccccatttctaaaggatggaaagagcccctgggaggtgaccgaggccacagccagcccctccctgttcagcactgaagaatgacacgcattacagagctctggagcagcccgcagtggaaagttggagctgaggtgtgtggcaggcagatgagggagcagagaactgctgaacagagtgagactcagaggacgtggttgagcatggctgcgaccctgcagttcctggtttgcctggtggtagccatttgtctcctctctggtgtgactacaacccagccccatgcaggtaccaggcttcagggtgggtggagaggagccaaggctgctggctgacagcagttaacagttggctctatttgaggctagtcgggcatagaagcgtgggcatggtgggtaccaggctgatgtgtgctgtggtgggtgacagtgtgggccccacccccagaactggaaaggtacaggtgacacctagggagatagccctaggtgctcttaatgctggccctgggctcattcccactgatgcccaaagcagggtctcttgacctgcctgggcttggaacaaacattgcaagggtgaggcaacaccccaaggtgtgggccggacggagctgccacagacatcctcccctgctctgtcctccctgcctcacatcctcccctgccccgtcctccctgcctcacatcctcccctgctctgtcctccctgccctgtcttcctcctccctcccttactgctgaggaggagcagggagagtaggctctttccaaagaggtctttgtccttgggagagtcactggcactgttttaggtgactttatcctcagatgactatagggaggggaggagggtggggaagggtcttgtgacccgttggcctggagctctttaacaagggcattgtgcaatttaaaggaggtgtcctgggcatttgccaacatggtaactgggcttggaatgatgcttttgagatcagaggacctatgcctgggagggtgaatgtcaatgtgcatgtgtgtgcgtgagagggaggggaaaggagggcatgggatggcattcctgcccttttgtagaatgatgaagcactcgggacctctaccaggcagcagaggggcacttctgggaggctggggtgttcatggtgtagcatggcaggggcctgactcctctctgctgccccagggcagcccatggacagcaccagcgtgggaggtggcctgcaggagccagaggccccggaagtgatgtttgaggtctttcctcccagcctgggacatgggggtgggcacgtccagaggtccctaagctcagggttgggaagggggatgtctcagggtggacctgctagggttgggtggggcaagccagcatgcgtactgctgcctgnnnnnnnnnnnnnnnnnnnncctgctgcctgcttctgccccttcccccagcccactcttgctccctgccctgctccccaggccacagcccaccccttacatggctccccttgcagctgctctgggctgggctggagctggatgtcatggggcagctgcacatccaggatgaggaactagcgtccacacacccaggccgccgactcagactcctcctgcagcaccacgtgcccagtgacttggagggcactgagcagtggctgcagcagctccaggacctgcggaaggggcctcctcttagcacttgggactttgaacatctgctcctcacaggcctgtcctgcgtctaccggctccacgcagctagtgaggctgaggaacggggccgctggrcccaggtcttcgctctcctggcacaggaaacactctgggacctgtgcaaaggtttctgcccccaggaccggcccccttccctggggtcctgggcctccatccttgaccccttcccctgaccctcctcttttgttctttcacctgccattaccccctcccatctcctcctcaaccccccaggcagacccatcttgcgcaggggcttctgtctggcatctgattcttttcaccgtgttcagatctctgggcttggcttgcaccctggacaccccctctctgcttaccccgaccagatcttgtttcctagatcttgagaggctaagaacccaggctctgggtcgcaaggagtgcgcaaggagtgggcacagagctaagggcacgacttgcaggcagtgtgtgtgtgagagtgtgtgtgtgtgtgtgtgtgtgtgtgtgtgtgtgtgtggagatcaggggtcagggttgagaagtgtgttcaagagatgctgaagggaagctgccccaagtaaggcctggtcagaccttccaactcctaccctggcagtctgtgacaggtcctgtggaattcacaggaatcctctaggtgctgagcatccccttttaggcacaaccaaggatttggggtctctgagcctccaagttcccatctgggttgggagaatcgactttttgagttctgtcagttggaagagtggagggaagcagggggagggaggaacattatctcttttggggtagggaggcaatatctcaacaagcgtcgggtgaatacctcagaggggggagtaaggctgggagaccaaggagagacaagcggaggtgggctggagcaggtgtggccctgattctgtgttgctcttctcataaaatgttctgtttcggcctcctggagcctgtgtcattctatgtcggaataagcgtctaacccctgctctgggcaaatcactctccccatcccgggaaggcaagagtcagggcaaccaggtatcaactcctcatctcattcccacgccctgctggaagaaggaatgcactgtttccttgaatcccatgcaccctgtggggtaatggggtgctgttccttgtcacagaaaggcatcagccgggggctaaggctgaggtcgtaggtcaatgatgagtcagagggctagacgaggtagggatataaaagggaggcccccaacggactaggcgaatgtggttccatcaaattcccacctcctcaccctcccagggtccaaggggaccttgctttccaacctccaaccccttccccgggcctgcgggcccgcagtagtcagcaccttcccgcctgccgccggcgaatgcgtcgcagtcaagacagcgcaggggcctgggctgccgggcgctgcgcgtgcccgctttccgctttattggcagagtccaggcgcgcccggaggccgtggcgctcgcgcgggactttcgagcctcgggcccggcctggcatgcacgcccctggccctcccgggctcttctctggcccggggctcacagtagctccgaggccccgaggccggcggggcggcgggggcgaggtcggggtacaccaggaagccggagaaggtgatgtacttgccgtggttgctgtaggcgccgtagccgtcgtggtcgtggctgagcagccagacggcgtcgcgcgccgcagggccagcatcacgctctggctctgcatctcgcggcggccgacgcgccgtcgtcgtaaatcatggcctgcacctcgtcgcggttcttcatcagcttaagccgacagcgtcttacgcgcagcttgcccagcgtgaaggagaagaagtaggcccgggcagacggcagcggaacgacgccggcacggccgtcgaagtcgccgccaatgttgacgaactcggtgtcgaaggcgagtggttggtgcccgccggggccagcgtccgagccctaaccgagactgtgcgcgcgcgccgatgatatggagcgcaggctacaggcgtggcgggcggcccgcatgtgcgcgtcagcgtcggcgtcggcgtagactaggtagccgctgaaggtggcgccgggcgccctagcgagtacgtgcgggcgccatgcagccgcagccacactgtgtcgccgtagtcgagctgcagcatggcgctctggctggctgcgcgccgcgcgcctggccgccgctgctcgtcgaaggccagcgcctgcacctcgtcgcggtttcgcaccagcy

SEQ ID NO: 95262 - DNA, 15371 bp, Homo sapiens
ggctggagggtagaggtctatgtggtatgcactgggggtattgctgggaagcagcagtgtttgaggatggctggagctgtgcagagcatctcctgtgacttgaggatgtgccagtcatgtccttggtaccactcgggataattcttactccaaagactgtaaacactaaaaatgaagtgcctaatgtacagtaagtgctcagtatttggctgattaaatagcaaatgctttcactgcatgcgatatccaaagaactactttgtaaagttttgtatataaattaattagaccctcacaacaatcttattaagaggtactattgtcacaactccccattcttcagataaggaaatgggcatagggacattcctaagatactcagtagcaagtgaccaagcacaatattcaaacccgagccggtcggcaccaagtttaaaattatgcagtgtagccgggcacggtggctcacgtctgtactctcagcattttgggaggccgagatgagtggattgcttgagttcaggagtttgtgaccagtctgagcaacatggcaaaaacctgtctctacaaaaaatacaaaaattagctggatgtggtggtgcgcctgtagccccaactactcaagaggcagaggtgggaggatggcttcagtccaggaggtgaaggttgtggagatcgcgccactgcactccagtccaagcaacatagcgagaccttgtcaaaaaaaaaaaaaaaatgaatgaatgaaagaattatgcagtgatactgcccagaggatagagtgcacgtgaaatgcttaacagtgaagtcggtgttcctgatggccgcgggtcggctgaaccggactcccagcgcccgagaggaggccaggggaactacaatgcccacaaggctccgcgccttcctcgatgtacttccggctggcctgggactcaggctgaacattggttctctgtgcggggcggtggcggggattggagggcgggagctgtgctgacttaggattggcaaaatcgctatcagccacgcctctaaaacccggaagtaacctccccggtagtcccacgtgtagcggagaaacagtagttaggatggctgaaggggatactcaccggctgaaggccgactgtgattccycctacccccacaaggcgattttgaccccctgagggctgctctagaggactcaggccccgaagctgtcccagggaggtccccgctgcatcccaccacccaagctgtgcctcatggagtcgatgtttagcagccctgccgaggcggcgctgcagcgagagaccggggtgccaggactgcttactcctcttccggacctggacggagtgtacgagctggagcgagtcgctggatttgtccgcgacctggggtgtgaacgagtgaggacagacttagggaagggtggctcgcctctgtcgggatgggtcgcccagaggatccggatcttgggggattttgtgagggcgagagggtgggggaatcagtctgtccgcagcgcgttgaccatccctcccttccacctactacgtggggcagagtgcccctctgggaccaggggctttgaaggttgagtgggagctcctggaagattgctttaaagaagccctcagtgggagagaggctgtccctgactccatggtttatgcttataggttgccttgcagttccctgaccagctattgggagatgctgtggctgtggctgcacgactggaggagacgacagggtcaaagatgttcattctgggtgacacagcctacggcaggtgtgaacttggccttaggtgggccaggcctggggatccggggctcatggggttttacgtctatgacagtgattgccttcaatggtggtgtttctccttgatgataatggtaatgactccccttctgatgctagctcctttcattgacaatgtcttcctttaatgaaaccattttattcactgaccacatttcccagtgatgacagcaactcgcctccagaagagaacccatttctctgatgctatcttccctgcagctgctgcgtggatgtgctgggtgctgagcaagctggagctcaggctctcatacattttggccctgcctgcttaagccctccagcccgcccactgcccgttgccttcgtgcttcgtcaacgttctgtggccttggagctctgtgtcaaggcctttgaggcccagaacccagaccccaaagcgcctgtggtgctgctgagtgagccggcctgtgcccatgccctgggtaaggggttttgcctgtgtatgcacaaagggtgagccaactgctttatgccttaatttccccatttccatataccatccatagaactcttgatatgggcttggccccagcctactgggtcatatttagtctyctggggatgagggagctcctgctttgccaggctccaacctcaacactacctccttctcttccagaggctttggctactctcctgcgcccacggkacctggacctgctagtctccagcccagcttttccccaaccagtgggktccctgagtccagagcctatgcccctagagcgttttgggcgccgcttcccccttgccccagggaggcgtctagaagagtatggtgccttctatgtagggggctctaaggccagccctgacccagaccttgacccagacctgagtcggctgctcttggggtgggcaccaggtcaacccttctcctcctgctgtccagatacagggaagactcaggatgagggtgcccgggctggacggctaagggcacgaagacgatatctggtagagagggccagagatgcccgcgtggtagggctgctggcaggcacactgggtgtagcccaacaccgtgaggcactggcccacttgcggaacctgactcaggctgctggcaagcgtagctatgtgttggccctggggcggcccacccctgccaagcttgccaacttccctgaggtggatgtctttgtgctattagcctgtcctctgggtgctctagccccccagctttctggtagcttcttccagcctatactggcaccatgtgagctggaagctgcctgcaaccctgcctggccacctccaggcctggctccccacctcacacattatgcggacttattgcctggtgagtagtgggggcattgcctaagctggaaacctggggcacggagtcagggggtgagtatggattttctttcctcctccctttcaggctctcccttccacgtggctctcccaccacctgagtcagagctgtgggaaaccccagacgtgtcactcattactggagatctccgacccccacctgcctggaagtcatcaaatgatcatggaagcttggctctgaccccacggccccagctggagctggctgagagcagtcctgcaggtaaatgtacaagtctccactcccagctgagctttttctccagatgcagcgcactcagactgagccccctccctctacagyctcattccttagttcccggagctggcaagggctggagccccgcctgggtcagacgccagtgacagaagctgtgagtggaagacgagggattgccatcgcctatgaggatgagggaagcggctgataccatgtggggctggagacatagatggacttatgaatggctgctaggacctttagtgctccctgcaccaacctcccatccccctgccaagatccttgaaggaccctggaaggagggagagcaggcagcccttcacaggataggatccgtctctgtcctgtcctggcactggcacaagctcagcacatgcccagtaatgcgtgttgtttggctgatggaataaagggcttagggacttccctgaggcctctggacccatctgtcttcctgagggcagcccaggacctttggccaatcccagttcccaggctgcagttgagggtctgtccttgtcaaaaggcaggtgctagacagtctagaccagggtttctcaaactcgtacttgacatttggggccagataattctttgttgtggggctgtctggtgtatggtagggtgctcagcagcatccctggcctctgcccactagacatcagaagcactcccccagttgtgacaaccaaaaatatctccagaccttggcaaatgttatctgtgggggaaaattgccctcaattgagaaccactggtctagctagacctgcactgtccagtacagtagccactaaatacatgtggctaaacttaaatttaagttaattaagattaaaagctcagtttctcagtcacattagtcattcaagtgttcagacagccacatgaggggacagtgcagctacaggatatgccatcatggcagaaagttctattggttggacagcgttggtctatactgactcttatttctcagggagatcacagcaacctaaataaaccagataccttttctctttgtgtttctttttaattcatgaaatactgcaggtcctgcactggtcctgggatgtagatgttaactgtatttaaccagattcctttccagtgtacctggaaagagagttaaatacgcagtcagtacacagtgaaacagctctatctgggaggagggaagccccagggacagctggatcccacaggagatacctgacaaggactaagaggaggcttcccagagggcataacacctatgctggatcttttggaggaaaaaataattgtcaggagaaaaggagtgaaaaagacctttgggcttaaacatgaaccaacatggcggatgcttcaagcaagtggggttgctgggccctaaaggtggagaggggtgaaatgaaaagactcgcctcttcttccccacatttgttgagaatctggtcacagtggcattgtcgagggtattgaaggtgaacaaaggagatgtggtccctgccctcagggaatgcctagtctaatggtggaggcagagctgtaagctaacaaggtaacccagacaaagtgggcatcagtcatgtgttctacaaatatgtactgaggacacactctgtgccaggtactggaaatacagcagtgagcgacacaaaagccatggtgcttccactcttccaggggagttggacaaataaaatacttagtatgccaaatggtgatcagtaagtaccgtgagaaatgtaaagctgggaagcagaggagcgtttaagcggggtggaatattaaacagaatggtcagagaaggccttttcaagaaggtgagcaaaaactgaaaggaagttacaggatgagccgcatgtatagttaggagaagcagagagagcaagtgcaagggcagtgaggtcgcggtatggttggcacgttcaaagaaatagcaaggagggcagtgcagccagaggagggagttagtgggggaatattagaaggtgaagtcagctgaggggcgtggggagcctagcaggctattgtgagaactttggcttttctcctgaatgaaatgggagccatcagggcatttcgacagggtagtgacatcttactgaagcttaataagcatcaccaggacatcgcgggagcccagcaaacgcgcttccctgccactgggttagggaaggcttgccggaaggacgatttcggaggacagcaggtgttagccaggcagcggagcgagcgccaacaggcgcactggggcggagagacgccgtgagcaaggtgaggcagagggcacgcgcggcgccacccgccacaggctaggacgcacggctgccagagaggacgccttaggggcccgcgagcaggctcgggaataaaacagggctggcagggcgaggtggagagactcgagaaggaccggccagatgtcgaagttcctagagaggagggcgcccaagcctccgccgagacgcgtgactacaactaccacaatccccagcgcctgcggttccagcgtcgccttgctctagacgggcggcggcgctgcgcggggaaccggcgtggggtcacgtggtaccggcgcatcacgtgggcgagttaggtgacgctgcggggcgggcggacagactgcgggacggacggtggacgctgggacgcgtttgtagctccggccccgccgttccgacccccgccgccgtcgccgccatgacggggctagcactgctctactccggggtcttcgtggccttctgggcctgcgcsctggccgtgggtgaggccgggtcctggcgggcgggagcagcatcgcggccgagctggccgggtcggaactcggcggggaagtggcctgcggggaatactggccccccgcgcgctctgcacccgaggctctggggacttgcgcctgcgagggcctctgactccgacaaaggagacccggatttccagctgcttgaggaggggtgcgggcgggtaggggccgcgagggcagcactcccccgtcctgccactatcgctgtctcccctcgctcccacgtctcactgctgtcccccctttcttgctcctgaccggcccgctcggtcacaagccggctgctccggttcctcttttcccagtcgctttgccctcccccacccacagcttgttgggtaaacagcggaacggactgggccggcgggatctggctggagcgcttgctccctcggtcccgcctcggattcgggcttgcgggtggcgaccctgcctgcgcaggtgcttggtctgggaggtggttttagcgagggaatggcagaaaatggaggcctaagcagaggaatctgtctacacagctgtactgtcacctggggrcagcctgaggacgccccttcagggaggtggcccttcagctckgcagctactttaggttgaagaacttctctctaccgagcagcccgtaaccccctttttctccctcactgctgcaggagtctgctacaccatttttgatttgggcttccgctttgatgtggcatggtaagggagggcrgggggaggattccccttgaagcttcttccctgcagcctctcttcttttctctggtctgagtccctcccccacaccactgcctgcctgggacatggacctttgggaaatacgcggtcagttgttgcctgyagaactggtggtggggttgaagggggtttgaggggttaagattttgtgctccgcttccctgctagagctgaactgctttcttctctgcttccacaacaggttcctgacggagacttcgcccttcatgtggtccaacctgggcattggcctagctatctccctgtctgtggttggggcagcctggtgagtattggggtggtgggactgggggcaggggctgagtcatggcaggtggtgtcactggggtcttaggcatgctgagggcagtgacagcttgggctctgctcatcagttttttatccttccaccaggggcatctatattaccggctcctccatcattggtggaggagtgaaggcccccaggatcaagaccaagaacctggtcaggtaagtgtcagggtccttggacttttgtcagaaccagctgtgttggcgctgcctgtgtgtttgatctgacatactgtttctgacaagccaccttgtgggatgggatgttataggggaaagattgctggggacttactgggcaggaaggacggtttctttctcatttctttctcctttccactccttacccctaatctctaccactaccagcatcatcttctgtgaggctgtggccatctacggcatcatcatggcaattgtcattagcaacatggctgaggtatggaaggccagggtggtggcgggaatccattccagtgtgttctacacattccttagagattggatggggtgcatcaggatggtttctgattacttttcttcttccctcagcctttcagtgccacagaccccaaggccatcggccatcggaactaccatgcaggtgggtggatgggcgtatgaatgcmaaatgctgggacttcatgcctgcttccactctcccccatcccagcttgggccatcattttgatattctctcacctactttttctgctttgcagagtggggatggtgattggccccattagcccatatctcccccattcctggcttagcctcactgcacccctctctatcctcccaggctactccatgtttggggctggcctcaccgtaggcctgtctaacctcttctgtggagtctgcgtgggcatcgtgggcagtggggctgccctggccgatgctcagaaccccagcctctttgtaaagattctcatcgtggagatctttggcagcgccattggcctctttggggtcatcgtcgcaattcttcaggtgatgaatccccttgggaagcctctgtgtccttgtccccarcctagccttaccctccttctggagaagctgaagtgctctccttctctacctataactatagattcccccaaacagcttccacctcctcatttccatcttctggttttctcctacaggggctctctatttttgtctctgatttggtgtcactgacaacagccctgttctttttcccccctttctaatgcgttgtatctgtatagcacttagtcctccctctttctgttctctcattttatctgccatgcttttcatgtctccagtctgtatttgtgatctagactagaatggaattttgtctgtctatatcagtctgtcatggtgtgtttgactgtctctcggagctatgtgtatctccctctcacatgcctgtcagtaggacaccattgtctaaattgtgtgtgtctagtctgtctgacagtgtgtgagtttgtgactaaggatcagcctgagggtctgagtgtgactgtgggtgcttgactgagttgattcttagtgactagctttatccatatgccacttctctccrtctgtcccacagcgtaactctgtggttgtctgtccctgtctgccttgtctgtcacagtgtgtccatcctggttagtcatatatctcttgtggtctgtccatccaaccatgtgctagatgtcatcttctatcatttgtcactgccttacctattcctctgtccctgcctgatttctcctgttctttttttgcagacctccagagtgaagatgggtgactagatgatatgtgtgggtgggrccgtgcctcamttttwtttattgctggttttcctgggacagctggagctgtgtcccttagcctttcagaggcttggtgttcagggccctccctgcactcccctcttgctgcgtgttgatttggaggcactgcagtccaggccgagtcctcagtgcggggagcrggctgctgctgctgactctgtgcagctgcgcacctgtgtcccccacctccaccctcaacccatcttcctagtgtttgtgaaataaacttggtatttgtctgggtcagtgcagcttctgttgccctcttgcgtcaccgttcacagaggaagggtaaagaggcctgtacgcctcagcctcatgccaatcccttgtcagctttctgactgcacacttctgatctgcacagagcttgctcctaggtggggaggcacgggtgctgggtggactctaacccccaaacagacttgtttggggatgagggagtgtgcagataggggcccctgggtgtgtttgtgcctgtagtccttctaggcccgtttgctcagggctctgactgaccaccatgcccgaattgtctgacagcatctacttacctggttgtacagtcgggcaccatcatctccgtccttgtgaggcctggagcctaggcagtggtctctgcctccagtgatggtcctgtccttctagcagcagcccctcccagaaacctctactctgatccttgttcccagggcccagggcagctcctcccaccccatccaatctcgttttctccttccctgaccctgtttcctgttaccccagaagccccagccacctccagcccacgcctttaagggtcctgccccctctctgctggccgaccttgaatcttggtccaattaaagagttgacaaatccctagccccgcagcctgagtccgcccaacctccaggtccccttcctggggagttcgcgctccaatgcaatccccactccccgctaagggactccacggtctgcacccgctcgccggtccgacctctaagcccaccctttggacgagcctgacccatttcctcccgcgctcccaggtccgtgcctcctgggtgcccgggttcggccgccggcagggcgggctcgcagcggcgcgcggcgggtgcgggcgtgctggaggcgggggccgcgggggcgcgcgcgcgggcgcgcgggccgggcctgcccctccgaggcgccgtagcgcgggagggaggcggcggcgctgtggtccgtgggtccgccggtccgtgggtctgcccggccgcccggccccgccctgccccccggggcggctcggctccatggccccgcggcggcggcggcggcggcggcggcgggaggcgacccgggggccgcggtggccgctgaccggacggccggaggcggcggggccggggccatgggggacggaaccgccgcagccgccggagccgggagccctgcccaagtcggagcggcgtcccctgctgagccccgagcgccgggtgagaggagggcgcgcgcggcccccacccaggggggcgagattccagacccagccccgcgaggggcaccccgagcgcggccccgagatcccaacccaggagccggtgagagaggcgccggcggccagaccccggcctggctgcccccaccccgcccccactccggcgcccctcctgggcttctccgcccgcgtccagccggcctccctcattgtcctcgctcgccccggcctcgtggcgcggggaggcgttccatacacgtttccccttggcctttgcctcatccgctgccctccacccactccccctgcccccaggctccacacccacccggtctgtgcggcctgcccgtccgcgggtgccacgtgttcagcctgccagccccgcccaaacgcacccctcagcctggccgccagcctgacccagaacccctgcgccggagggagggtgggaatgtctgcacgtgggtctgggtgtgagctgtctgagagtctggatgtatggctgtggaagtccaggagcagtggccttgtttgtgagtgtgggacttagtgtgttactgtcacccgggtgtgtctgtgactgtagttctctgtgtgtctgagtgtgggtgaccagctgggaccagggtgtccctgtgattctgtgtgcctgtgagactcaccctgctccctgaagcactgccagaagtggctgccgctctcttggaaccacagctggagccatcgcccaggcaagacccccttcctgccatgcccagtgctgtgcccatctccaggcccaagcatcccgttccgggaatcagaaccagctgtgctgggcaggacccagagtcttggtcccagtcccaaggggctggctttgaggtcttaagtgaggggtgtcccctgccttgccccgtattttgacgttttgctccagtgggaagggattctgtaaacatccagtctgtatttgggccccccggatgctgagggcaacttcccagcctggtcccagttggcctggcctgcttgtcgctgggatctgaatgaccaaaccacttcccaccatggctcctggaaggactaaatgaagtcatgagtataaagtgctcctgcatggtaggtgcacagtattccgtctcttccctcttccccaagccatgagttctgggttaaggatgctgccatgtgaggtgtctgttctcaggggcacaggggcacatgggggtctataggtaaacatgtctccatgcttaggtacaaaccagtgtggttagagttcacgtgtctgtgttcctgggaatgcgtgagtgtgtgtgtagagttgtgcaataagggtgagtgcctgagtgtgtgtgtcagtgaggtggaggaaggtaaatgtatgtggcttagtagtggggtgtgcttgaggatgtgagtactgagttgccgggaactgtgcctgggtgtctgtttggaggtaagttcttgagtctgtgagtgtgaaagggtatgagcaggtcagtgtgaggtgtggcccacgagtgtgagcagctgagtgggaggtaggtgggcagccttgcctgtcctgccctgacctgctggatctgtttccctcccaccctgctcaggccagcagccggatgcccgggcccactgggcgggccagtggccgcctgcgggatgagcagactgctgggggggacgctggagcgcgtctgcaaggctgtgctccttctctgcctgctgcacttcctcgtggccgtcatcctctactttgacgtctacgcccagcacctggccttcttcagccgcttcagtgcccgaggccctgcccatgccctccacccagctgctagcagcagcagcagcagcagcaactgctcccggcccaacgccaccgcctctagctccgggctccctgaggtccccagtgccctgcccggtcccacggctcccacgctgccaccctgtcctgactcgccacctggtcttggtgagcctggagggtagggcctgcctgtggggaaacagggttttattggtttgactagagaaatggcatctggacccaggggtgtgccaggggtccaggtctgttgtaagagggctattcttggggttccctagcccacccccaggctgagggtgggggctggtatctgtggattctggccaatgccctgattcctgacactgtcctgtctgcagtgggcagactgctgatcgagttcacctcacccatgcccctggagcgggtgcagagggagaacccaggcgtgctcatgggcggccgatacacaccgcccgactgcaccccagcccagacggtggcggtcatcatcccctttagacaccgggaacaccacctgcgctactggctccactatctacaccccatcttgaggcggcagcggctgcgctacggcgtctatgtcatcaaccaggtgcccatgcgggggtccatgtgcctgttggtgtatatatgtgggttgggggcgtttgtgggtccttgtctgcccgtgtggatatgtggatggacctgggcgtgggtagtcggtgtttgtcagtgtgcacaggaatgtgtacgcacagtgtgtgcatgtgaatgttggcatgcacactggcaggtgtgtgcatggtctcagaaggggttgagccccactctctacccttggcaggcctcaccccatggtggtgcaggccttgggtatgctgtaggaggagatgttgagggccctgaggagagggagttagaccctgaaagaaggatgaagcctgtagaaccctttggggtaggtgccagccacagctgaggccagggcactcagctcagcatcttaaggcctttggtggacctggctagggctggccactaggtcccagaagggacctctgatgcaggcccccccgcccccgccgaccacagagacctcctagacttggacatgggtccctcccgtatgatgggacacaagtggaggtggagcagggggccgtgggagcacagagggccccagtccagccctggggttgggaagcagttgctgagatgggtcttgcgggatgagcaggcatcaggggctgcagaagccagcattctaggcagagggacctggaggatgcagggccagcaagataactggcctcgtgttcacgaactattggctgaggtgtggtgtccagcatgtggactgggtagcaaagatgaggctggaggagttggaagtcaaactgagaaatgtcttgggaggcatgctggcagtaagtccagcgcaaaagtgacagggcaccatgtaaggttgtaaggagagagtgacttgcgtgtttgctttgtagaaaggtcactctggttgcatatggagcatggatggagaggggagattagagacagcgtggcccgtttggaagagaggacgatgcccaggaaagaggcggtgaccctgcggatgtgtggggcgggagtcgcggggaagaagtggggttgttacgcaagtagtggagagtgagaaaagagcgacgtcaggacagcgcaagggtttccgccttggctgttggctgtggggatggctgtgtctgagtgagatggggacacaggagctgggccagctctgggggagtgtgactctgaatcctttcttgcgtgtgatgagtttgagcgcctgtgggaagtacatgtttagcaggcagttagacaaatgagtctggacccagaagggaggtctgcagtggagagagggatctgggagcaccaggatgaagacggtctggtccctaaaaccaacaacgtctgacctgccagggagcaaggggcatgagaggaggaagccagcacttcagggatggagggagaaagaggccgctacagaggccgagaggcttggccagaagggctggaggagacccaggggagtgtgggatcccggaaacccggcagtcagtgtcaggaaggagacatggcagctgcatgggcactgtgggggtgtgaggagggatgtggaccaagactcgtccagtggatttagcaacaaggtgggcccagcgagagccatttcaggggcatggtgggggcggaagcagattgcagtgggttgaagaaggaatcggatttgacgaaatggaaataaccaattagagacaactctttaaaaaaaaatccctgctgagaagggaaggcaaaaggtagggtggtggctggagggaggtttgttttttcagttgggagaggattgagcatgtttatgagccatgtgggagagacacagggctcctggctggtgagaggtcagaaggagtgctgctgagctgggaggaaagcgatggtctctccaagggctgggggaagaggaggtgcaggagagggagagaagagagctggcagggctgggcaggtcagggttcccgaggggagcagctcccacctcttctggcagtggctttgctggtggagaagagggcctttctctccgctcattccagaaaggccactcaccgatcccctctccaggaacctttctggttctagcctggagactgcaggttggggcaggggctcaggggtcagcgcctcccactgaatgctccctgctagtcctagtccagagtctggtgcttaggcctgcatggccaggacccctgcagccccaattctcaggggaccccaggcttgctgggctgtgactgcctatagaccctatgcttgtcattttgttggagagacaagtgaatctagcccagacctgtcctggtctcagaggctgcccaggcagccggatgcagctccagggagcctgaggctcctgcatcttagacactggtcat

SEQ ID NO: 95263 - DNA, 23992 bp, Homo sapiens
aagattaaaagctcagtttctcagtcacattagtcattcaagtgttcagacagccacatgaggggacagtgcagctacaggatatgccatcatggcagaaagttctattggttggacagcgttggtctatactgactcttatttctcagggagatcacagcaacctaaataaaccagataccttttctctttgtgtttctttttaattcatgaaatactgcaggtcctgcactggtcctgggatgtagatgttaactgtatttaaccagattcctttccagtgtacctggaaagagagttaaatacgcagtcagtacacagtgaaacagctctatctgggaggagggaagccccagggacagctggatcccacaggagatacctgacaaggactaagaggaggcttcccagagggcataacacctatgctggatcttttggaggaaaaaataattgtcaggagaaaaggagtgaaaaagacctttgggcttaaacatgaaccaacatggcggatgcttcaagcaagtggggttgctgggccctaaaggtggagaggggtgaaatgaaaagactcgcctcttcttccccacatttgttgagaatctggtcacagtggcattgtcgagggtattgaaggtgaacaaaggagatgtggtccctgccctcagggaatgcctagtctaatggtggaggcagagctgtaagctaacaaggtaacccagacaaagtgggcatcagtcatgtgttctacaaatatgtactgaggacacactctgtgccaggtactggaaatacagcagtgagcgacacaaaagccatggtgcttccactcttccaggggagttggacaaataaaatacttagtatgccaaatggtgatcagtaagtaccgtgagaaatgtaaagctgggaagcagaggagcgtttaagcggggtggaatattaaacagaatggtcagagaaggccttttcaagaaggtgagcaaaaactgaaaggaagttacaggatgagccgcatgtatagttaggagaagcagagagagcaagtgcaagggcagtgaggtcgcggtatggttggcacgttcaaagaaatagcaaggagggcagtgcagccagaggagggagttagtgggggaatattagaaggtgaagtcagctgaggggcgtggggagcctagcaggctattgtgagaactttggcttttctcctgaatgaaatgggagccatcagggcatttcgacagggtagtgacatcttactgaagcttaataagcatcaccaggacatcgcgggagcccagcaaacgcgcttccctgccactgggttagggaaggcttgccggaaggacgatttcggaggacagcaggtgttagccaggcagcggagcgagcgccaacaggcgcactggggcggagagacgccgtgagcaaggtgaggcagagggcacgcgcggcgccacccgccacaggctaggacgcacggctgccagagaggacgccttaggggcccgcgagcaggctcgggaataaaacagggctggcagggcgaggtggagagactcgagaaggaccggccagatgtcgaagttcctagagaggagggcgcccaagcctccgccgagacgcgtgactacaactaccacaatccccagcgcctgcggttccagcgtcgccttgctctagacgggcggcggcgctgcgcggggaaccggcgtggggtcacgtggyaccggcgcatcacgtgggcgagttaggtgacgctgcggggcgggcggacagactgcgggacggacggtggacgctgggacgcgtttgtagctccggccccgccgttccgacccccgccgccgtcgccgccatgacggggctagcactgctctactccggggtcttcgtggccttctgggcctgcgcgctggccgtgggtgaggccgggtcctggcgggcgggagcagcatcgcggccgagctggccgggtcggaactcggcggggaagtggcctgcggggaatactggccccccgcgcgctctgcacccgaggctctggggacttgcgcctgcgagggcctctgactccgacaaaggagacccggatttccagctgcttgaggaggggtgcgggcgggtaggggccgcgagggcagcactcccccgtcctgccactatcgctgtctcccctcgctcccacgtctcactgctgtcccccctttcttgctcctgaccggcccgctcggtcacaagccggctgctccggttcctcttttcccagtcgctttgccctcccccacccacagcttgttgggtaaacagcggaacggactgggccggcgggatctggctggagcgcttgctccctcggtcccgcctcggattcgggcttgcgggtggcgaccctgcctgcgcaggtgcttggtctgggaggtggttttagcgagggaatggcagaaaatggaggcctaagcagaggaatctgtctacacagctgtactgtcacctgggggcagcctgaggacgccccttcagggaggtggcccttcagctcggcagctactttaggttgaagaacttctctctaccgagcagcccgtaaccccctttttctccctcactgctgcaggagtctgctacaccatttttgatttgggcttccgctttgatgtggcatggtaagggagggcrgggggaggattccccttgaagcttcttccctgcagcctctcttcttttctctggtctgagtccctcccccacaccactgcctgcctgggacatggacctttgggaaatacgcggtcagttgttgcctgtagaactggtggtggggttgaagggggtttgaggggttaagattttgtgctccgcttccctgctagagctgaactgctttcttctctgcttccacaacaggttcctgacggagacttcgcccttcatgtggtccaacctgggcattggcctagctatctccctgtctgtggttggggcagcctggtgagtattggggtggtgggactgggggcaggggctgagtcatggcaggtggtgtcactggggtcttaggcatgctgagggcagtgacagcttgggctctgctcatcagttttttatccttccaccaggggcatctatattaccggctcctccatcattggtggaggagtgaaggcccccaggatcaagaccaagaacctggtcaggtaagtgtcagggtccttggacttttgtcagaaccagctgtgttggcgctgcctgtgtgtttgatctgacatactgtttctgacaagccaccttgtgggatgggatgttataggggaaagattgctggggacttactgggcaggaaggacggtttctttctcatttctttctcctttccactccttacccctaatctctaccactaccagcatcatcttctgtgaggctgtggccatctacggcatcatcatggcaattgtcattagcaacatggctgaggtatggaaggccagggtggtggcgggaatccattccagtgtgttctacacattccttagagattggatggggtgcatcaggatggtttctgattacttttcttcttccctcagcctttcagtgccacagaccccaaggccatcggccatcggaactaccatgcaggtgggtggatgggcgtatgaatgccaaatgctgggacttcatgcctgcttccactctcccccatcccagcttgggccatcattttgatattctctcacctactttttctgctttgcagagtggggatggtgattggccccattagcccatatctcccccattcctggcttagcctcactgcacccctctctatcctcccaggctactccatgtttggggctggcctcaccgtaggcctgtctaacctcttctgtggagtctgcgtgggcatcgtgggcagtggggctgccctggccgatgctcagaaccccagcctctttgtaaagattctcatcgtggagatctttggcagcgccattggcctctttggggtcatcgtcgcaattcttcaggtgatgaatccccttgggaagcctctgtgtccttgtccccaacctagccttaccctccttctggagaagctgaagtgctctccttctctacctataactatagattcccccaaacagcttccacctcctcatttccatcttctggttttctcctacaggggctctctatttttgtctctgatttggtgtcactgacaacagccctgttctttttcccccctttctaatgcgttgtatctgtatagcacttagtcctccctctttctgttctctcattttatctgccatgcttttcatgtctccagtctgtatttgtgatctagactagaatggaattttgtctgtctatatcagtctgtcatggtgtgtttgactgtctctcggagctatgtgtatctccctctcacatgcctgtcagtaggacaccattgtctaaattgtgtgtgtctagtctgtctgacagtgtgtgagtttgtgactaaggatcagcctgagggtctgagtgtgactgtgggtgcttgactgagttgattcttagtgactagctttatccatatgccacttctctccgtctgtcccacagcgtaactctgtggttgtctgtccctgtctgccttgtctgtcacagtgtgtccatcctggttagtcatatatctcttgtggtctgtccatccaaccatgtgctagatgtcatcttctatcatttgtcactgccttacctattcctctgtccctgcctgatttctcctgttctttttttgcagacctccagagtgaagatgggtgactagatgatatgtgtgggtgggrccgtgcctcamttttwtttattgctggttttcctgggacagctggagctgtgtcccttagcctttcagaggcttggtgttcagggccctccctgcactcccctcttgctgcgtgttgatttggaggcactgcagtccaggccgagtcctcagtgcggggagcrggctgctgctgctgactctgtgcagctgcgcacctgtgtcccccacctccaccctcaacccatcttcctagtgtttgtgaaataaacttggtatttgtctgggtcagtgcagcttctgttgccctcttgcgtcaccgttcacagaggaagggtaaagaggcctgtacgcctcagcctcatgccaatcccttgtcagctttctgactgcacacttctgatctgcacagagcttgctcctaggtggggaggcacgggtgctgggtggactctaacccccaaacagacttgtttggggatgagggagtgtgcagataggggcccctgggtgtgtttgtgcctgtagtccttctaggcccgtttgctcagggctctgactgaccaccatgcccgaattgtctgacagcatctacttacctggttgtacagtcgggcaccatcatctccgtccttgtgaggcctggagcctaggcagtggtctctgcctccagtgatggtcctgtccttctagcagcagcccctcccagaaacctctactctgatccttgttcccagggcccagggcagctcctcccaccccatccaatctcgttttctccttccctgaccctgtttcctgttaccccagaagccccagccacctccagcccacgcctttaagggtcctgccccctctctgctggccgaccttgaatcttggtccaattaaagagttgacaaatccctagccccgcagcctgagtccgcccaacctccaggtccccttcctggggagttcgcgctccaatgcaatccccactccccgctaagggactccacggtctgcacccgctcgccggtccgacctctaagcccaccctttggacgagcctgacccatttcctcccgcgctcccaggtccgtgcctcctgggtgcccgggttcggccgccggcagggcgggctcgcagcggcgcgcggcgggtgcgggcgtgctggaggcgggggccgcgggggcgcgcgcgcgggcgcgcgggccgggcctgcccctccgaggcgccgtagcgcgggagggaggcggcggcgctgtggtccgtgggtccgccggtccgtgggtctgcccggccgcccggccccgccctgccccccggggcggctcggctccatggccccgcggcggcggcggcggcggcggcggcgggaggcgacccgggggccgcggtggccgctgaccggacggccggaggcggcggggccggggccatgggggacggaaccgccgcagccgccggagccgggagccctgcccaagtcggagcggcgtcccctgctgagccccgagcgccgggtgagaggagggcgcgcgcggcccccacccaggggggcgagattccagacccagccccgcgaggggcaccccgagcgcggccccgagatcccaacccaggagccggtgagagaggcgccggcggccagaccccggcctggctgcccccaccccgcccccactccggcgcccctcctgggcttctccgcccgcgtccagccggcctccctcattgtcctcgctcgccccggcctcgtggcgcggggaggcgttccatacacgtttccccttggcctttgcctcatccgctgccctccacccactccccctgcccccaggctccacacccacccggtctgtgcggcctgcccgtccgcgggtgccacgtgttcagcctgccagccccgcccaaacgcacccctcagcctggccgccagcctgacccagaacccctgcgccggagggagggtgggaatgtctgcacgtgggtctgggtgtgagctgyctgagagtctggatgtatggctgtggaagtccaggagcagtggccttgtttgtgagtgtgggacttagtgtgttactgtcacccgggtgtgtctgtgactgtagttctctgtgtgtctgagtgtgggtgaccagctgggaccagggtgtccctgtgattctgtgtgcctgtgagactcaccctgctccctgaagcactgccagaagtggctgccgctctcttggaaccacagctggagccatcgcccaggcaagacccccttcctgccatgcccagtgctgtgcccatctccaggcccaagcatcccgttccgggaatcagaaccagctgtgctgggcaggacccagagtcttggtcccagtcccaaggggctggctttgaggtcttaagtgaggggtgtcccctgccttgccccgtattttgacgttttgctccagtgggaagggattctgtaaacatccagtctgtatttgggccccccggatgctgagggcaacttcccagcctggtcccagttggcctggcctgcttgtcgctgggatctgaatgaccaaaccacttcccaccatggctcctggaaggactaaatgaagtcatgagtataaagtgctcctgcatggtaggtgcacagtattccgtctcttccctcttccccaagccatgagttstgggttaaggatgctgccatgtgaggtgtctgttctcaggggcacaggggcacatgggggtctataggtaaacatgtctccatgcttaggtacaaaccagtgtggttagagttcacgtgyctgtgttcctgggaatgcgtgagtgtgtgtrtagagttgtgcaataagggtgagtgcctgagtgtgtgtgtcagtgaggtggaggaaggtaaatgtatgtggcttagtagtggggtgtgcttgaggatgtgagtactgagttgccgggaactgtgcctgggtgtctgtttggaggtaarttcttgagtctgtgagygtgaaagggtatgagcaggtcagtgtgaggtgtggcccacgagtgtgagcagctgagtgggaggtaggtgggcagccttgcctgtcctgccctgacctgctggatctgtttccctcccaccctgctcaggccagcagccggatgcccgggcccactgggcgggccagtggccgcctgcgggatgagcagactgctgggggggacgctggagcgcgtctgcaaggctgtgctccttctctgcctgctgcacttcctcgtggccgtcatcctctactttgacgtctacgcccagcacctggccttcttcakccgcttcagtgcccgaggccctgcccatgccctccacccagctgctagcagcagcagcagcagcagcaactgctcccggcccaacgccaccgcctytagctccgggctccctgaggtccccagkgccctgcccggtcccacggctcccacgctgccaccctgtcctgactcgccacctggtcttggtgagcctggagggtagggcctgcctgtggggaaacagggttttattggtttgactagagaaatggcatctggacccaggggtgtgccaggggtccaggtctgttgtaagagggctattcttggggttccctagcccacccccaggctgagggtgggggctggtatctgtggattctggccaatgccctgattcctgacactgtcctgtctgcagtgggcagactgctgatcgagttcacctcacccatgcccctggagcgggtgcasagggagaacccaggcgtgctcatgggcggccgatacacaycgcccgactgcaccccagcccagacggtggcggtcatcatcccctttagacaccgggaacaccacctgcgctactggctccactatctacaccccatyttgaggcggcagcggctgcgctacggcgtctatgtcatcaaccaggtgcccatgygggggtccatgtgcctgttggtgtatatatgtgggttgggggcgtttgtgggtccttgtctgcccgtgtggatatgtggatggacctgggcgtgggtagtcggtgtttgtcagtgtgcacaggaatgtgtacgcacagtgtgtgcatgtgaatgttggcatgcacactggcaggtgtgtgcatggtctcagaaggggttgagccccactctctacccttggcaggcctcaccccatggtggtgcaggccttgggtatgctgtaggaggagatgttgagggccctgaggagagggagttagaccctgaaagaaggatgaagcctgtagaaccctttggggtaggtgccagccacagctgaggccagggcactcagctcagcatcttaaggcctttggtggacctggctagggctggccactaggtcccagaagggacctctgatgcaggcccccccgcccccgccgaccacagagacctcctagacttggacatgggtccctccygtatgatgggacacaagtggaggtggagcagggggccgtgggagcacagagggccccagtccagccctggggttgggaagcagttgctgagatgggtcttgcgggatgagcaggcatcaggggctgcagaagccagcattctaggcagagggacctggaggatgcagggccagcaagataactggcctcgtgttcacgaactattggctgaggtgtggtgtccagcatgtggactgggtagcaaagatgaggctggaggagttggaagtcaaactgagaaatgtcttgggaggcatgctggcagtaagtccagcgcaaaagtgacagggcaccatgtaaggttgtaaggagagagtgacttgcgtgtttgctttgtagaaaggtcactctggttgcatatggagcatggatggagaggggagattagagacagcgtggcccgtttggaagagaggacgatgcccaggaaagaggcggtgaccctgcggatgtgtggggcgggagtcgcggggaagaagtggggttgttacgcaagtagtggagagtgagaaaagagcgacgtcaggacagcgcaagggtttccgccttggctgttggctgtggggatggctgtgtctgagtgagatggggacacaggagctgggccagctctgggggagtgtgactctgaatcctttcttgcgtgtgatgagtttgagcgcctgtgggaagtacatgtttagcaggcagttagacaaatgagtctggacccagaagggaggtctgcagtggagagagggatctgggagcaccaggatgaagacggtctggtccctaaaaccaacaacgtctgacctgccagggagcaaggggcatgagaggaggaagccagcacttcagggatggagggagaaagaggccgctacagaggccgagaggcttggccagaagggctggaggagacccaggggagtgtgggatcccggaaacccggcagtcagtgtcaggaaggagacatggcagctgcatgggcactgtgggggtgtgaggagggatgtggaccaagactcgtccagtggatttagcaacaaggtgggcccagcgagagccatttcaggggcatggtgggggcggaagcagattgcagtgggttgaagaaggaatcggatttgacgaaatggaaataaccaattagagacaactctttaaaaaaaaatccctgctgagaagggaaggcaaaaggtagggtggtggctggagggaggtttgttttttcagttgggagaggattgagcatgtttatgagccatgtgggagagacacagggctcctggctggtgagaggtcagaaggagtgctgctgagctgggaggaaagcgatggtctctccaarggctgggggaagaggaggtgcaggagagggagagaagagagctggcagggctgggcaggtcagggttcccgaggggagcagctcccacctcttctggcagtggctttgctggtggagaagagggcctttctctccgctcattccagaaaggccactcaccgatcccctctccaggaacctttctggttctagcctggagackgcaggttggggcaggggctcaggggtcagcgcctcccactgaatgctccctgctagtcctagtccagagtctggtgcttaggcctrcatggccaggacccctgcagccccaattctcaggggaccccaggcttgctgggctgtgactgcctatagaccctatgcttgtcattttgttggagagacaagtgaatctagcccagacctgtcctggtctcagaggctgcccaggcagccggatgcagctccagggagcctgaggctcctgcatcttagacactggtcatttggggcattcgttgtttgtctcactgcatgactctatacacagcagggaggggaccagggctggccatctccagaatccccgctagcacaaaggagagagcgccacagggcatgtttgaatgagtgaatgagatgagaactccacctgacgttgtcaatgggtattggcataaaggaagcccatgggaaggaaggaataagcgtactggggtggggaagtgtggtcaggggagccgctccagccctgagtgtgacaagcacaggtactgctaaccccaaggcctggaggcaaggaagagtctggcatattccggggctgctgagggatgttgtgtggctgggcctcgggacctgagggcagtggccagagaggaggctggagccacatatgaaaggcctttgtaggccagatcccggtcgagaagctggactagatcctgagagcctggaggagccatgcagcgagggggctggtagatccccagagactgctctggagagtggcaaaagggcaggtgcttgttggtcacaggcccagggttgacctgctcctccccctacccagcatggtgaggacaccttcaaccgggccaagctgcttaacgtgggcttcctagaggcgctgaaggaggatgccgcctatgactgcttcatcttcagcgatgtggacctggtccccatggatgaccgcaacctataccgctgcggcgaccaaccccgccactttgccattgccatggacaagtttggcttccggtgagggctstcttctcagctggacccagccctcctgcccccaccagacgcaggcccacttccagcccccgagccccgcttgctcctggctgtggcccagaccccactggcgaggctggatcctccctggaccccattggacattccccccgacctggtctctggtccttcccctggagtccccttgggacccttactgacacctgccttcccatgccacaggcttccctatgctggctactttggaggtgtgtcaggcctgagtaaggctcagtttctgagaatcaatggcttccccaatgagtactggggctggggtggcgaggatgatgacatcttcaaccggtgagtaagcacgcggtggggaataggctgggtggggggggggggggggttcagactgggtggggttctttgcccttcctggagcctgttccagtctgtccgtccccatcctcaggatctccctgactgggatgaagatctcacgcccagacatccgaatyggccgctaccgcatgatcaagcacgaccgcgacaagcataacgaacctaaccctcagaggtgaccccagcaccctcaccccttactccccagaggcaacttcccaatatccccaactcttgaccccaagtggcccaatccctgatcccccagtgggggacctccaagcatccttgactccaaaaaggtgactcccagtgccactgattccctgatgtgatccaaggcccctcaggactgctgkcacccctgatcgttgtcccccaacccccagcccagcctcagcccaatatctctgacctctggcctgattcctagaggtgaccrgaatttaatgtcagggcctaaatagtcattgagtagattgcattcctattggtgccctcgaagacctcacttgtgcacctgtgggacccctgccggggcagataggacacgagctaatgggtgctgggcacagctcctgtggacctgacaaaggggacctgagcagtatgggaagggggtgtggaaagacagtgcccacccctctgaaattgaaggaggtggatgtatctcttaggaggtagccacatttggtatcaggctggctgggagaagggcctaaagggtgtgtgaaatgtaaacaagggcttcctgacactgctctgacttgtgctaaactttctgggggtgggagacccagagtagtcacacccaatccgtgctttcccttacgaagttcattccaggcagggagatagtcatggaaaaaggcagttatagcacaaggtcatcaaggcaaggtgttgtcttggcagaagagggactggtgatggaagccttcctggaggaggtgatggtaacctggagtttgaaatagttactcatttaacaaatatttgcctcacacctaccttgggcacagtgctacattccccaggctaatagaggaagccagcctggataaggagaatcatatctggaagattctggaatgtgaacatgtatgatacataccgagagtctgaaactatttggttttaagatctctgaaggctgatagtgacagtggggcgggggaaagtcacgtctggatgttaggggtttttcttctgttgccctttcaccatgtacatgtcaggggtcttgaatacctgatgggaggttaacttttgtcccagaggactggggagtcatggaagaacctgaagaagggagaggcggggtggggtttgtgtttagaaggcacactgtttgagcttcaggaaggcgaaagcctggcatagccgctgggtggagcaggagagaaagtcagcccggcctgaaggaatcgatggagtccaagggagcatagtggtacagggcctggggatggaggtgctgtgtccccagcttgagcaggagggtttttctactctgaacacggggtaggagtgggggaggtggtttgtagccctggtgtggggttggtgcctgggagaagcatgaggcactggggaggcacagggagctgatgaaaaagtggttctgatgaaaactatggtcagcaggaaacaggtaagagmccaagaggagaggggcttcagggcatctggggaggagtggagctccacagtacacgccaggagccttggtcctgtttcaggagtagcctgcctgagtgccaccatcaattacacatgtctggcttggttgtagatgtggcaagatagcaagaagtttctggcttaaagaactctgtgaatgttggattcatggattgggtatgactactctgggtctgccacccccagaaagtttagcacaagtcacagagcagcgtcaggaagcccttgtttacatttcacacaccctttaggcccttctcccagccagcctgataccagattcacagagttcacaaactgtgaactctctctacctagttgctgttgcctaaaatctgggagttctggattcttcttttcctcaccctacatatccaaacccatcagcgagtaatatcactgccacccctaaaacatatttgagtccatttgctttccccctttactacctttaccttagtccaacctctgggatcctgcctggactactgcagtggcctccaactggtttccctgtttatggcttggcccccaactgggttaaacatttctcagagcctttacacatttcattctgtgagaatgaaaacatgagctgctcgctctgacttagagccctgcccttgcacggtgtacttgaacctccaagctaatattctgcttttccacgtgccccattcaggtttagccactcagctgtgcaaaatcttattcccaatttagggtcaccatgtgctctgacctctayctggagtgctttgcccctgcccttagctcagtgtcacatatgccctcttgtctctcttagcactccgatgttttctctgttacctgcctcccctagagaagccaacttgccctgagatgaaggaccccacctgtcatggccatggcagtagccttggtgcttagagcacagcctggcacatggtggtgctcaataaatagctggcaagagagtcactaaagaacgaggaacagagaaaatggcacaggcgtggggagtaaaaatgatgcatctgattgcgcttgaagtgcctgtgggatgcctggtctcaggcttaraaaggtctgagctgacctcacaccgtggctcatgtctgtaatcccagcactttgggagactgaggcaggcagatcacttgaggttaggagctcgagaccagcctggccgacatagtgaaaccttgtctctaccaaaaatmcaaaaaaaaaaaaaaaaaaagacggggcacggtggctcatgcctgtaatccctgcactttgggaggccaatgtgggcagatcacctgaggtcagtagttcgagaccagcctggccaaaatggtgaaccccatctctactaaaaataccaaaaaaattagctgggtgtggtggtgggcgcctgtaatcccacctactcgggaggctgaggcaggaggttgggaggcaacctcttgaacccaggaggcagaggttgcagtgagctgagactgcactactgtactccatcctgggcaacagagcaagactctcaaaaaagagagcgtctcaaaaaaccaaaacaaaaagccggacgtggtggtgtgcacctgtagtctcagctactcaggaggctaaggcaggagaatcgcttgaacccaggaggcagaggttgcagtgagccgagaccgcgccactatattccagcctaggcaacagagcaagactctgtctcaaaaaaaaaaaaaaaaaaaaagtctgagctgagagatttgtgagggtgtcagacgtctgttttctgactggagcagctgacatctctgttttgagggccaatgcaggagcagaagggctcctgccaaatcaaccctggaaggagccagattggcttaagcctaggccccagagatcccatattgggtttggtggtgttaacttaaaaatcactagatcagctggatgaggtggctcatgcctataatcccagcactttgggtagtcaaggcgggtggatcacctgaggttaggagttcgagaccagcctgaccaacatggtgaaaccccatctctactaaaaatacaaaaatcagctggcgcagtggcaggcatctgtaatcccagctactcagaaggctgaggcaggagaatcgcttgaacctgggaagtggagggtgcagtgagccgaggtggtgccattgtactctgtctcaaaaaaaaaaaaaaaaaaaaaatcactagatcaataaatttgaaaaggagactttatttctcttttataaagggttacaacctgcaggctggccatcccactggctaggaagcagagcctccagccaaagccttaacaggcactttgagggagggaggagtgagataggaattttagttgaatggattggtcaacaggttactggaggagctaygaatatttacggarggggtcctgacatatgcatatcgaacaaacatgcatgttatataccatccatgttcaccttggggtggagacttaatatttaaatatatcgcagttaggccccatacgtcaaaaagacaaaagcactcaagtgcgcagcctctgtaagctggctagaaccagtccatggccgatggtcttatcaggagaaagttactgagatcagtctcttgtcccaccaaagctataattatggcttgtggaacaggggcgtaggggtcagcatctggcagtgggtgagctgcaaatttttttctattatttatattaccacattatacaaattgttttaatattggttatctcaagtcctgtacttgtttagctgctacagaaaaagaaaatcctcgcggcagttagagcatagtctcttctttaagtgcagaggtgcaagacttaacccttgcctggcatggccttagakcctatttataattaggtatcttattgacacaaacaatgcattctgtcagtcttgtgatctctgctttgacgttaatgctggtcatttgttgtgtctaagctgcaaaagggcgtgggcataacatggcatgtttgacgtcccttcccatcatagctggaaaccctgtttttaaggttccctggggtcccctyggccaaaagggggtccatttagttggttggggggtgtaggattttatttttagtttacagttgttagccctgatgtggaccatttccatcctatctaggtttaccaagattcaaaacacgaagctgaccatgaagcgggacsgcattgggtcagtgcggtaccaggtcttggaggtgtctcggcaaccactcttcaccaatatcacagtggacattgggcggcctccgtcgtggccccctcgrggctgacactaatggacagaggctctcggtgccgaagattgcctgccagaggactgaccacagcctggctggcagctgctctgtggaggacctccaggactgagactgggctctgttttccaagggtcttcactaggccccctagctacacctggaagtttcagaacccactttggggggcctcctgcctgggcaggctcttcaagtgtggccctctttggagtcaaccctccttcccgaccccctccccctagcccagccccagtcactgtcagggtcgggccagcccctgcactgcctcgcagagtggcctgggctaggtcactccacctctctgtgcctcagtttcccccccttgagtcccctagggcctggaagggtgggaggtatgtctagggggcagtgtctcttccagggggaattctcagctcttgggaacccccttrctcccaggggaggggaaacctttttcattcaacattgtagggggcaagctttggtgcgccccctgctgaggagcagccccaggaggggaccagaggggatgctgtgtcgctgcctgggatcttggggttggcctttgcatgggaggcaggtggggcttggatcagtaagtctggttcccgcytccctgtctgagagaggaggcaggagccccagggccggcttgtgtttgtacattgcacagaaacttgtgtgggtgctttagtaaaaaacgtgaatggagcagctcccttgtctgtttgggggtgggggtcgggtccctgaacgtggttaccctgagtgtgttgtggtggaagggcacttggggaacctggcccaacaagtaaacctgacccgggccatcctggttctccaagcgctgccactccctaggctttcactggccttaaggggaagtttgtccttgcactgcttccgggacagtggaggcgacgaagtaataaacccgtggacccagatttctcaggtcttaacacgttccctgaggcctaaaggtgcccagggccgagcccaaagtgcttgggtcagggctcggtggagcgccgaggtgagtctgaactcccagccggcacgcgccgcccgccggaccaaacacgagagggggcggggccctagagtcgcggcgtggtttcccgggtgatggccacgcggaagaggtggggctagggccctggttcccactgcctagtttctgggcccccggcatccgagtcggccaaaagccgggcagaagagagcgccaaggactggcagttccggaacgggcaatcccagccgaggggaccagcggcagagcacgggtggggcttgggagagggcggggcccatagaggggcggggtttggtgagcgttgccggcgggcccgcggtacctcccgcactctgacctgcggcccgtaggtccgagccggggacggcggcgtcggtgggtcatgctccggcactccccctcgctgtgggagctggtggaggagcacgttccgctccgggagcgacgcgaagtgaagaggattctgggggaggcggcggtggacctgagcctggagctgcgggcggaggtggggagagggaaggtgggccacgcccctggcctgccccacgactcgggtgatttcccacctctgcgggtccctggccctgccgggtaactcccgagatcctatcctggtctcccctttgactccgccctctccctcactcccccagcccccaccattccggacactcccctccccagtcgcaaggtatcccagctctccttgcaggtggcgatgttacgggcactgctccaagaggctcgatcctctcaagcccccagctcccgccccatctctgacccctcttctcttctggcaccaccgcctctcctaaaggacctcttgcgccaggagctccggcagttgctccagggtctccgccacaaagccatctgtgagggcaggtgggagcctcaggcctgggccctttccctagataccaggtgggctagcgctgcccctaacaaggagccagggttgccttttctgtggtttccagaaaggagcctctcagcttccttcctgtgcaccttctgcagggaccaggcccaagcttgggtccagtatagccccagggtcctgcactttgccttggaggagcccaggtgtgatttgccagaacaggagatattccagatgagaggtggtgggcccaggtaaggtgatggtaggagagagggatctgtccctgcttggcagagggccctagcccactggtgggttgcacctggctccatgcaggagattccagtcacgggctgggcacttccaccgccacttgtgatagagattatcagcccatgagggctactgaaacccagaggaaacacctgcctagcctggggacaggcaaagcttcctggagaaagtggtttgatctgcgtgttgtagtatgaggagcagttttcagggagatgaaagagaagagctttgtaggaagagggaagaaaggaagccatgtccagcaggcggttgttcctctggcctagagaacaggagtgagggctgggctagggaggcagggagagctgaagaggatggtcacaaatggtatttacagctgggactgaatgagataaaatattcataagtggatggcagcaacttcttattctaatcctcacacagcctgaggaggtgggcaaaatctccattttgcacaagaggaaattaaaggccgggcatagtggctcatgcctgtaatcccagcactttgggaggctgaggcgggaggatggcttgaggccaggagtttgagatcagcctgggcaacacagggagaccccatctttacaaaaagtgaaaaaaaaaaaatagtcaggtgaggtggcgcatgcctgtattcccagctacttgggaggctgaggtgggataattgcttgagctcaggaattcggggctgcagtgagctatgattgcacctgtgcactccaacctgggtgacaaagaccctgtctctaagaaaaaaaaaaagaagcctgggcaacatagtgagaccccatctgtgcaaaaaaattgaacaggcgtggtggcacgcacctgtagtcccagctactcaggaggctgatgtgggaagagcacttgagcccgggatgtcaaggctgcagtgagccaagatggtgctactgcactccagcctgggcaacagagcacaatcttgtctcaaaaaaaaaaaaaaaaaaggaaaagaaactaaagctcagaagcgataagtgatttgcctgaagtcacacacaatgaagggtggcagagctcatttgcaaacctaggctcccaaactcttactctttgcactatattatattgcctttgtgagaaaagaaacagttgcctagaagtgatatttgggtcctgaaggcctggggtgagcaacatgcggagagtgatagtgacttcattgccagcagcggtcacagagatctcagcatcatcaaggaccaactgaacgtgtccaacattgaccaggtggccagacacctgaggtgaggcccaggggcacctgcatgtgtataggcaggggtggagacaaggatggatcttgaggtgctgggattgtgagacaggaggtgggtagtatacttggcggggaggcccatgtgcgtaaggctgagaggtggaaagagctggctgctatagagctagtgaggttgctttcaggaagcagccaagtacagatgccacggccgagcatgatggtgcatgcctataatcccagcaatttgggaggccgaggcaagagggtcatttgggcccaggaattcgaaaccagcttggccaacatgggaaaaccccatctctaccaaaacaaatacaaaaattagctgggcgtggtggtgcacgcctgtaccagttacttgggaggctgaggtgagaagggattgattgagccctggaaggtaaggctacagtgagtcatgatgggtggcagagcaagaccctgtttctttctttctttctttcttttttttttttttttgagatggagtcttgttctggcgcccaggctggagtgcagtggcgtgatcttggctcactgcaagctccacctcccgggttcacaccattctcctgcctaagcctcccgagtagctgggactacagatgcccaccaccatgcccagctaatttttttgtatttttagtagaggcggggtttcactgtgttagccaggatggtctcgatctcttgatctcatgatccgcccatctcagcctcccaaagtgctgggattacaggcatgagccacctcgcctggccgaccctgtttcaaaaataaataccttgacacaggggtagcctgtgtcagaggattttaagcagcggaagggctgtgatgtgggggaagatggaggcaagaagaatcacagtgcagaagtgtgggagagagaaggatgcctgccagggtgaggcaggcgaggggaagatacttcctgcccagaaagagcctcacaggggccagacgtctatgctgggtcagcccccaagcagcagagggcagtgtgggctgaggaaggacaggttgggtggggctcctgctgaggctggaggttggggccatgtggtggactcagctgagccctggtcctgtgtctcgggttctggctgctgctccctcatgtcccaggggccttctggaggaggagtgtcacaccttggagagggagatcctcatcctgcaggtgagccgcagccctgggccctyccccgagcctcactgctgagcgtagactctcacctgggtgagacccatgtacctgtgtgcatacataggtgcatgtacaggctatgtgagtcctgcatccatttctcaggggtgcatgcttgtgtgcacctgcaaaatcctggaggcccaggattctagttgagcccttaaggccagggccaaccgttttaggtcttttgcctccttcctttacctaagtctgggtacaggccccaccactatcttgccaaactcagctcttccgcaaggctggtattccctggggaacgtggctgccctcacggtggatgggctgaaggggctgcacgggcctgccctggggatcttggcctctgtatcctgccttgccccacccctgccttgagtctgggcactgacgcagctctccctgcagcgctgcctggaagaggagtatttgaggccttgccacccctctgaggcagccctggagcccaccctggcaggtgaggacacggagcagggcccagaacacccagcctcctgctcccaccccacacttgtacacaccctagaagagctgggcactgtctcagcccaatctctccttcagagctaaaggaacagaagaaggccatggagcaggagctgcaggcatctgtggggccttcttgtgtctctcccaaccacaggtaaaccacaacagtagacacagggcagggtggactgaaggatcagaccaccacccctcacagttactctttcttgtccaggcagcggcccttggggtcctccacacagggcctcagacccccgcttcccctctgcggggttgcacctctccagtgctgcctgcctgcacctcctctggagccctaccttcgacctcgaggccagtcggctacccaccgctggggacggcagcttcagtgcagccccagggaagggccagcttccacacccatgtccagtgcagcaccccaagycccagcctgaagggctggtcaccgagtaggctctggcttctgccacagcgcacctgtctgccgctgccgcctcagctgctttggcccagccagcttcagatctggtcttggcgagctctcgccaggaccccaaggctgttggtctgtctggcccttgccccacccccttgccagatccctggtgtctggagctgagtggccgggcrtcggtcccaagcatcaaagcctttggcctttctcctcccaggcctccacaaaggcctggcagacagaggtctcattccagcctgactcttgtcccctgggggacccagacaaagcacagcagccgctcagagacaggaatagaaatttcattaaaatctatggactttaaaatcctagtggtgcacaatgggcagggatgggcggcgcaccgttattgctacagaggattagaggtggcttggccggggctgtcactgcacagaggacggacaaatgaacacttcagggattcagacacttcagaaggggctcccactccagagaggggaggggcatgtgggctggggccatttggcacatgaacgagggcagcacatttgggaagactgggcctttagcctcatggagggagggcaagggggtgtcgtgcagggtccccttccccagggtgctgggctcaaacctcctgtggagcagcccccaccccatcccccagaaacaaatgctttgggcaggctgctgggtcacgggcccctgctggctgggcctgacagccaggcctggaatgaggggcagagaccccggagcagcccagtgaggtgcaagcaggcctggaagacagactgaacccgaggctgggggcgaggaggtggcgaccacagagaatacaatgtttacaaaaataattacacagataaacagggctgggcagcacagcctgacaagtaacactgggcagtcccccagcccttcatcctgcccctagggaggaatagccaaatgtgcctggcagaggctggggtcggctctgag

SEQ ID NO: 95264 - DNA, 237339 bp, Homo sapiens
  misc_feature (1)...(237339): n = A,T,C or G
gttgcgcagcaccactgctggagtgcagtggcatggtcatggctcactgcagcctcatcctcccggcctcaagcagtcctcagccttccgagtaactgggactataggcgtgtgccatcacacctggataattttttatgttttgtagagatggggtctcccctgtgttgcccaggctggtcttgaactcctgggctgatgcgatcctcctacctctgcctcccaaagtgagggattacaggcatgagccaccatgcctggcctagtaatttttttcaaataaaactggtattccatgaacaaagcagctagtgtaattcacaactcaaacaacacagatagatttctttgagacaaccaaaagtgtcttatgaggacttaacacatgtactcaatgattaagatttaacaacattaataattttttactgcttcatcaagggatattgttacatgcaatctagagtttttgctcttttctcctaaattatgagtgtacagtggtgaaaaatgcaataacaactagtagagcttagggtcagtgccttgatctgtgctcaggtgccagcagttgtacctatcctaggtaaatgacaacacagtgacaaaggctaatagtttaatattataaaaatagccatgtctcacttgctccctgacagtgtctcaggaacccctcagaggttcacagaccacattttcagaagtgctgttataggaggtggaactgaattgcagagaacttaaacaatttatcaaatatcaaacatttgagtagttaaatcttagaacacctcagatattgggtgtaggaggctgtagtttatgcctaattgttagattgatacaaaatgtatttactgattacctattcagtaaatgaattgtcaataagtagggaactgtttccactcaataaatgaactgtagcatgattgtaagagcagatgtgagcatccacatccttttagactcactgccctgcccctctctcattttttaagccatgtccctaaggaccttctcccaggtatacctatcagacctttcattcagccaatatgctgaatgaaatatccccccgtataccaagccctatgctgggaatacgatgaggacttggggtacttacctgcttctggaaggaataaaagttctgaagtactttgccaggtcccatggtaggtgactctttttcatctttcctgttaagaacatatttcttggttgggcacagtggctcatgcctgtaatcccaccactttggcaagccgaggcaggcagatcacctgaggtaaggagttcgagaccagactggccaacatggtgaaaccccgtctctactaaaaatacaaagattagctgggcatggtggcacgtgcctgttgtcccagctactcgggaggctgaggcaggaggattgctagaacccaggaggctgaggttgcaatgagccaagatcaggccactgtattccagcgtgatctcagctctctgcaagctccgcctcctgggttcacaccattctcctgcctcagactcccgagtagctgggactacaggcgcctgccaccacacctggctaattttttgcatttttagtagagatggggtttcaccatgttagccaggatggtcttgatctcctgacctggtgatctgcctgcctcagcctcccaaagtgctgcgattacaggcatgagccaccgtgcctggccaaaaaaaacacatgtcttatagttgagtatggttctagtatttcttcatggcagagccctggagaacccgcaggggaacagttgagggaatgtaagaaggactcttgattctggcacttaactcctgtgtttactaagtttgttatagctggattttttttttttttttggtcacctagaagcaggagagggcagagataggggcagactttgacttagcaaggtctttaactgttaacatttttcagcccagagagctgccttgctctctaaaacagttactttgtcctggttcactcttccctgagtagaggacagttacctttgtgtgcaggtggacgttcctttcaccctccttccttcctgtttcctcagagccaggactgtctccagtttggtcctcctgctgaaggggaagtggtccaagtgagatggacagacggccaagtctatggagccaagtttgtggcctcccaccctatccaaatgtaccaggtatccaaarttctacctttctagggagtggggggtgcttgattaattctgtgcttcctgttgggccagaggcgagtctttgctcttaggagaactaataggttggtaaccctttcagagctaggggtctgccctgtttccagtctgccaaatgtgaagtaaggtagttgttattttagtgttctaactccttcctttgactgtaggggactgccactgtgcatggtggaccagggaaagagtcagggatatcctagccaaaaggcctttgtttccttggtaggtggagtttgaggatggctcacaacttgtggttaagagagatgatgtatacacactggatgaagagcttcccaagagagtcaaatctagactggtgagtattttctgtgtccccccagttcctgtcttggagggagggaacaagtcaaggatgcatccctttgtattgttcctggggtagctgacacttggcttgcttattcttctatagtcagtagcctcagacatgcgcttcaatgagattttcacagagaaagaggttaagcaagaaaagaaacggcaacgagttatcaactcaagataccgggaagattatattgagcctgcactataccgggccatcatggagtaggtgcttccagggtccaagggattctcagccatccaggcaagagcactctgggttccacagcacagcagacatggaacgctgaagtctctgaaagtgaagttgtaaaaagaaaaggaatgaaataaccgacccatcatcttctcacccaccctcattgcattccgctgtagtgaaaggacgagccatttctgggcacgtggcagcagtcgctgatctcccagctgaggggctgagcactggaatgctgtggctgcactggccccagtccatagaggggtcaactatgctggctggactggctgccttgttcctggcctaggacttagcttcataactatcacctgcaccgactaggctgaggtgctggtacttgccccaacccctacttttgtatttatatgtgtgtgtgtgtgtgcgtgcgtgcgtgcgtgcgtgtatgtttggtctggaccagcttctgccagcccctggcctttactttcttccttgcctatgcagggcaaacaaaatgtgaaattctgccctcagctgagctgagtaagggctcctgggggttggctggagatgggtgtggcatctgtccaggcctggaaccgtctcaagacagtgctggcaaagctgcagtattgagatgctaaggagctgatgccacctctttgtcttcccctaaaggagaacatggggataacatgggtgtgtgcccacaacactctaggtgcagagcccctgtggcaaagtattacagggtgtgggtggggattaccctgaatcggggattttaatgatggaagcaggcagagcctggtgggtgattctgtcaacagaaaattgcaatcatgcaggggctgggagggttaggatgaaaaaactggggccattggaggcccactgtaggtgggagggagctgattttggggtggggggtgggactagagggcaatactgaaggggttaaacaggtttttgctcctcaagaatttgtttgcctgggcccaggattggagggcttcacaccaataccctgtgtatacaagaatcagatttataatacttccccttttwtgttacgtatgaacactataaaccaaattattttgaaaactggtgcatcmccttgtccttagcaataaaatgtgttgagcagaggattggctgtctgccccaaggagcccacgtggcccacgtcaggctggggggtgtatctagagtcataggctctggagcggggctgtgtattttaagacaaatcagtaaggcattccctaggaagttccagagagtgggtcctttgcttgtcaagctctgtattaggccaagtatggtgggtcatgggagcagggacacttctggctctgagcacctctttgttgtgcttgctctgccttagagacgggcaagatgaggtaacagaggaagcaccagaccaatgagtcctctcaacagagtatctctcactgctgccccatttgatacatctttgttgaactggcctaagttcatgccagcatctgtgctctatacaaattgtggaaccagtgggaaggatgggtgcattttaggtgcttgaaaagcaagggactcaacctccagtgggatcctcagattgctctccgagctgtctagttggtgagaagcttccctggaggaagacccaatctcctttggctggtagatccctgaggtcaaagtggacaaggatggggaaccacagagcagggaggggggcaatgaataggtgcaggacttgggtgccccggagctgcaccggctggcccttaaacagccaggcacttcctgtggcatggccctgtccaggtgcaggagaggcttaggtcagttcagctgctctggatgcttccttgtgtccctgggggttgagaggtggttgctacttggtatctcattgtggagaaagggaggtgcaggaggtgatcttttctatgtcagctccctcctggggcccagggagggaagttggcctttttttttctttgcccacactccacttggggattcccaggggatgtagcaagggaggctgggcagaaccaggccttagtggattggtgagagaacactaatccatacatctttggaagagaggaacacttcaccagcctttttacacaggatccctacctttctcgatgaccccactgcctccaggggtgggcgctgggtttaatcccagcagtttttactcaacagctgaccagttttccagaaactgcactttttttttttggtcaacctaataactcttaggaaactgcaactcaggtgatccaaatcacacagaccggcccgttctctcccctactggctgcctatgcagtcgggtcgacctcaagagaactggccccagccaaaagcggcacctcccggcctgccagtcccttcctgccttaggcagctcctcccagaagcctttttgtagggcaaactgccttccctttgtaaggtagggcctttggatccaaggttgcagtttaaagaccaccccgactttgttgaggaattaagttttaaattccgccccaggcggataacaccagggctcagccgcaggaatgaaaaaggagtgggagggctgcaaagtgtacgtggggcttggaggccttgtgccacgcgcggactaaaaatgttctacgagtctcttaacgctcacccccgtgcccccttacccaccagggcccacggaggtccgaagctttcggcctcagtgagcggaatgggtgcgctcacgacctggagggcgagatgagatgtccctcggcgtgaagtggccgtgactaccctagcactttgcgttccccgcgcgggcgacgaaacacgctctcgaggggagagagccgtgcgtcctctgggccgtgaagccaggggaagagggttcctctagacagctcgatgtgcccgggagagacacccacgctgaacctgcaagctggggtgctccaccagcgcgaacctctcgccccgcactcgccgcagcactgctctcgtggtaggcggggtgggcgggacggcaaatccgcggctcctgcgtctattgggctgctcggggcagcgcagctccgcattggccaggccctcgctccgcccggcttccgcgagcccattggtcgcaggcgcccgaccgggtcgcggccgcgcgctccgcccgccgctgcgtccccactatggcggcgcccatgcagcccagcgcgttgtgggctcccgccggggtcccccgcggctgtcgccgccgcctacgccgctgcctccgccttcctgccccgcgtcgggycgggcgccacctcccccctgcctccctctccgctgtggtaagggcctgcccagtgcgcttcggggcgcgatggctgaccgcgaataacggtcgccgctccgccccgcccctcccccgccggccgcgggtcccgggctgggcggggcgcggagcccgcgcgctagtgcccgggaaggcggggtcggggcacggcccagtcgtccttcgggctgggggcccagtacctggatgacctctcctgggtgggggccgccgagcctgggggaaaggccggccggacgcaggccaggaggtctgagatcatctccgtgtgaaaccccgcagcgctgcgcaccttggcgcagagcacggacaccgtcattcgggccctgctgtgggaaaaggaaagaaaagtccagggagcgcctgagcgggaatcggcagcgtttgggtagcggttgtcattgcttactgctctagcgggggccagaactggggtcagtttgatcggcaaagtacgcctctcttgcttcctttccttctggcactttcccccgttgtgtcctcggtgcttttgcttgcaagagaaaatatcttagtgaggagggcaggtttggttaggagagtgtcccatgaacattttggattcctttttacaacaatgtccatttttatgattcctcagtaagcctcatttatgtttccttcacgtatgaggaaggagtgaaacctgataactgaatgtaattaattgagggaaggaccagtgaaggcrgctattacctcagaaagtaaaatactcaaacttttcagtggatgtactgtgaattatagatagctggacattaaggtaggaaaaaactcttattaggttactaaaagtaagatagtccccatgacaaattaggttgtttctaaggcagaattatcttgtagagatgatcactgaaatgtttggtgtactttcaagtcaacagaggattaaaaggaagctggcacagaaatttatagccaaatgatactttcaaataatctcttaaggcaatacagctcctcctatgattagagattcttaaggatattttgagatattaagtggtgaatctctccatttcgcgtgtctaactgtctaaccatggtttaataaaaataaaatgttaacgatgaaacaagacattcatgttctcagagactaacagactttgtatcaatcaatggaacgcctcttgagtacatattttatgcaaggcattgactgaggggaaactcaaaaccatttaagataagaaacttgctctaatgggcctataatatacttgagggaataaagcacacacatgacaatgataactgtgatatggtctctagaattccaagatggtaggtactctgagaaaccgagaaaaggagaaatccatgtgtttgaggaaggtttcacagggaagctgaggcttgaattgggtcatgaagagtgggtagccggctgkatgaaggggaagaagtgagcagatgagaaagtgaggatgacaaaggtgcaggggaacctgagatgctcatgggtggttccagggggtttcttagcagaaaaagcaggatatgaggttgcacaaaaggtaggttgatggcattaatccaagaggtacctttgtcctgtgtggtgcaaagagtaaacaagtaatagaatttacttcaaaggaagctgtagctaactatcaggaatacagtaacactttacttgtcattgtcactttttcttttttcttttttttttgagacagggtctccctctgtcacccatgctggagtgcagtgaatgtggctctctgcagccttgactttctggactcaggcgatcctcccacctcagcttcccaagtagctgggaccacaggcaggtgacctggagaattaaaaaaaattttttttgtagagacagggtcttgtcatgttgcccaggctgttcttgaactcctgggctcaagaaatcttcccaccttgagttcgagaccagcctagccaacatgatgaaaccccgtctctaccaaaaaaaaaatacaaaaaattagccaggcgtggtggcaggcgcctgtaatcccagctgctcgggaggctgaggcaggagaatcgcttgaacccgggaggtggaggttgcaatgagccgagatcgcgccagtgcactccagactgggcaacaagcgtgaaactcggtcaaaaaaaagaaagaaagaaatcctccacctcagcctcccaaagtgttgagaatatatgcgtgagccaccacacctagcccattgtcgcttttctgattcacctcagctacttggaataacagttctctcaacccagaagcggcacctcaagtttattcttacttttcttctttttttctccccgtgtttttggttgggtgccaggtcttgttgaccctacttccacactgtttctggcatctgcttctatttttgagtcagagcctccctctgttgcccaggctggagtgcagtggccccatctcagcccactgcaacctccaccacctgggttaaagtaattctcccgtctcagcctcctgagtagctgggacgacaggcgtgtgccaccacacccggctaatttttgtatttttaatagagacggggtttcaccatgttggccaggctgatcttgaactcctgatctcaagtgatctgcccaccttagcctcccaaagtgctgggattataggcatgagccaccatacctagcctggcatctgcttcttttcactcctactgtcatcacactgatctggggccattggaccattcctgtgaattaccacagaaaccccctaacatttttttccttccatccatcatgtgtattgccatcacttccaagtttgtcacttctccagccaggactttgaatggctccccattatctgttgcgttaggcacagaccagcctggcatgggcaatatgggcaaactgatttcttgccattctgttatattttccaggtcaatggaactatttgctctttgtgctttgctgtttgtgctctgtatctttgctcatgttggctttttctatcttaaatagtctccttgactttaattgttcttacgtatgtttcagggccatttgatacggaacttcctttgtgaagcttatctgtactttttcttcccatctagatgagctgtctctcttctttaagtttaaaccaccataacattagagtctgcctttttgcgataattgccttaaatcctgcttctacccacagtataagactgaagctatttcaagacatagactgtcctcttcatcatccaactttgtacatagtaggtacttggcaaatatattttatattgaaaatagctttgaatcaggatggatgcagagataattctttatccaaacaaaatgtttatcattaaaatctataaataaagttgtttatgtgagagaatcccttactgagagatctgtattgacatagatagcttggattaggctgcactaacaaaaacctcaagacttcagtggcgtaacagaacaaaacttgacttctcattcatgtgacgtgtccagcatgagtgtacaggaaactcttcacagttactcaggaactgaggctgatagaaactccatcttaatatggtactgccatgaccattttgattaaatgaaaagatagtggtcaagtggacactggcttttcaagtttctgtcccactatggcacatgccactttcattcacattttcattggccaaagcaagtcacatagccatgcctaactttaaagaaggttagagaatttcagtgttagcatatgtctgggaagcaaagagccagaaatatttggtgcatagcactaatgactactacctcatctggggtatcacagcccattgaagattagaggtagcacatcagatgggctgctagagacaaacattgacagtagcaagaaataatagctctaaccaggcatggggtaatggtagattcagagtcaaaactcttccaagcacttgtaaatgctcacaggccaagggtgttgatacaagggcaatctgttacatccgagttatgacacagtcattcctgaggaatgtcttttacaaaacttactatgttacagcattcttagtaacaaatacagcaatggttctgagatagcaaaaaataaaagttaaattatattcagggtattcaatttataagaaattgggaaatgtgtaataattttaggtgcattttcactcaaatggttaaaattaaaaagtaatcttagtttaaccttactggtttaattgaacctagcaaacttggtatttggggaggaggtttcacttttgacagacaatagaaacagtgctggttggagccctggttcaggaaacagatttgggttcagatcttggctcttccactattaatagttgtctgacattaagcaggaatcttatttttgagcctaagtttcctcatcagtgaaatgcatggggcagttgtgagaattaaacaagtcagttcatgtaaagtgctttgcagagcacgtggttcacagtaagcactcatgatcacagtgcttctaaccagctgcagcaaggttagaagaaacttgagaaatcaggtaaggagccctcagaaatacaggtagaagggttcccctggatttccccaccttttttctcccttggacagcatccctacgatctcttattttcacatttttcatattttatgtgagtgtatacatttctktctctcctactagaccaggtgctctcatcatccacaaatgtgtactgaacataagctctgccaggctctgtgctaggtggtggcttgataggtatgaaggacatgtccctggcctcaaagaacctccagtctagtaggaccagaagcaagtaaagaatacattataaccagaagcagaatacattataacaagggctgtggttgagggtcttgtgggatcttctaaaagcgcacctgatatcgtggggaatatgagtactggttttctagggaagttcacatctgacctacatcttgaaaaatcagtagttattagctgggtggatatgggtttaaaaggcttttcacacaggcaacaatgtgtgctgtggcctagaagcaaagaatgtggctacatcctaaagacactggtgtggcaggagtatggagcctgttgggggagtgtgtgggaaatgaggctgcagaaatcggtcaagaatagattgtgaaggtctttgtgagttatgaagttagagctttatcctgaaggtgattaggtgccactgaaggatttgaagatagaaagtgactactttgtcagctttgcctttcaggaacatcactgtgtggaagaggcagaatagtgaatagctatttccctcacatggggagttctgaggtttgcatccatagtaccatgcctactacacaagagtcataaaatatttatgcaggatgaaggttagaatgaggtaagactggacggaaggatagttacgctgstgcaacatgtgagsggcatgtctgtgtgcttcctagggctagatgagcagcagaccaggatttcagtcatagcctggccagtttctattgtgtcaccttggataggcttcagaatgtcatgtcttcttggttttcaaatttggaaaatgaggacaaaaattcctaccttgccaggttgctctgaggattggagggaataggtgtaaaaagcctggtcttgagctattagtagatctatacaagtaatagtttaataataaaaaacagttataatatttctaatctttagtatattacctggttcatggtaggtgatcactagtcttaaatctcactacctaaagatgccaacgttgtgggatttttttttttttttttttttgagaaaagtactcactctrtcacccaggctggagtgcactggcatgatatgatcacgattcactgcagcctcaacctcccaggctcaggtggtcctcccacctcagcctcccagatagctggtaccacaggcactcacgcaccaccacgcccagctaattttttgtgttttttatagagatgtggtttcaccatattgcccacgctggtctcgagctcttgggctcaagtgatctgcccagctctgcctcccgaagcgctgggtttacacgcgtgagccactacggccagccacgttgtggttttatttttgcatttattttaggtcttactaacaaggatatgcattttaagtgatggatgatgctaggctgggagtgttaggcataagggaattactctgagatcaaaaagagacagttgataagaatgccatacgggccgggtgcagtagctcatacatgtgatcccagcactttgggaggccgaggtgggtggattatctgaggttaggagttcgaggccagcctggccaatgtgttgaaaccccgtctctattaaaaatacaaaaagtagctgggcatggtggcaggcgcctgtaatcccagctacccaggaggctgaggcaggagagtcacttgaacccgggaggcggaggttgcagtgagccgagatcgtgccactgcactccagcctgggtgacaagacagggaaactccatctcaaaaaaaaaaaaaaaatcccatacaaatttaaacattgttgctgggcgcagtggctcatgcctgtaatcctagcactttgggaggccgaggtgggcggattgcctgagttcaggagttccagaacagcctgggcaacacggtgaaaccccgtctctactaaaatacaaaaaaaaaaaaaaaaaaaaaaattagctgggcatggcagcgtgcacctgtagtcccagctgctctggaggctgaggcaggagaattgcttgaacctgggaggcggaggttgcagtgagccgagatcacgccactgcattccaccctgggcagcagagcaagactccatctccaaaaataaaaaatttaaacattgcttaaatgccaacagtttatatggcatttagctattcccaacccttgctcagaagtgacacaaatgtgtgtgaccataatatactcatcagatggggttgctaaaacatacacacttctcctcggcctgtcattgctgacttcttccccctgaaattttgctcctcctcagtcatcttctgatgatttttttaaagatagtaatggaagtttaattcatatttattttccattagattctttatatgatcatcctggcttgacatgagttcctcctctctcaactcctgtagaacttaatttatgttactctgatgaaatgtcatctactgccttggcccattatttgtctatgtatcataaatttcctcttccttgatgtcagtttttcttgcaaagtaactgaaaggtggcatgtttatgtatttttaacacagcttaaaaactcactgaacccttttgtttggaatatgttaaatcaggaaattctgttactgaggatttaaagaatgtagcagttgttctctttggtctcgggattcccttaaagtttaaaaattattgagtattcccaaataactttcatgtttgtgagtattgtctgtcgatatttaatgttttaaaaatcactgagtacaaaaaaaaaatgataaaaaatgttcatggctgtgcgcggtggctcacgcctataatcccagcactttgggaggctgaagtagggggatcacttgagctcaggagtttgagaccagcctgggcaacatagtgaaactycatatctaccaaaaatacaaaaaaattagccaggtgtggtagcacatgcctctggtaccccctacttgggaggctgaggtgggaggattgcctgagcctgggaggcagaggttgcagtgagccgagatcatgccactacactccagcctgggggacagagtgagactctgtctaaaaaaaaaaaaaaagttcagcctgggtaacatagtgagactacatctcttcaaaaaattaaaaaattagccaagcatggtggcacatccctgtagtcccagctactagggaggctgacagcaggattgcctgagcctaggaggttgaggctgcaatgagctgtgatcatggtactgcacttcagcatgggtggcagagtgagaccctgtctcaaaaatcacaataacccacaagcatgcatactgttaactgtgagaagaatcgtggtcacctcatcatgttatataacctctagaaaactgctggactctcataagagaatgagagtgaacaaggcaaagaatgtcttagattgtgaaaatagttctaaactcatggaccccctaaaagggtcttggggacccttgagggtccttggactacactttgagaactgctggtatatagttacgagtttttgtgtgacttttatatccttctggtaacaacataagaatggaaacattaaaaacgtctattttcaaaatgcactcaacagttttctttaaaaaacagctagtttctagcctctgataatattaatggcaaaaaccacaattatttttgcaccaaccgaaatagatgtttattttggaagggcagctgtgtgtatttttggagtatctgctaggtgccatactgtttacatttgccatcccaggaaaggtcaccaaactgagaacaacaacatttttgtagaagaaaattatgtaactgctctttaagttctagaactcttataagcacttggtgacatgataactggaaaactttttcgtggtgcaggtttcagagtttctcgctgtctcattgtcaagtttagttatgatcctatttaaaagatcctattacgggcttgctttggcagcacatatactaaaattggaacgatacagagaagattaggatgacacacaaatttatgaagtgttccataaaaaaatctttttaacatccaatttttacggaactaaccatattgatgtcatctgtactacatgaaccgtactacattaggacgtgaatgagtgaatggcggtaccacacactctacactgyggaattttcacacttcctgaggagtcttcctgaacctcatgtgcgacagacatctgacttagggactgcatgaggaggccggtgtccatgaaattaaacaccaagagaggtttataaataggaggtgtggtatttttcttccaataccctgctgaatcactttgagtgcccttcgaggtgtacatcccgtacatcccctctttgagggcaaatggcctgggctgttataatggcttcttcttgctctgtgcttagccttctccagtcagttctccatattgctacacgagcaacctttctaaaacatagatttacgtcatttgtttatgtacgtggttcctcattgccaatgggataaatttcagactccttagcgtggcttgtaatccctctcctgcccttctgcttcagcttcccagagtcagtttaattcaggcaacgcctctgaagcttttcctgagcctcccagacaattattaattcccataatctcataacatctgttccttgtttattccataactgcacgaatcaccctgctccttgagggcaggcaccactccctgtgtgtccgctgctttactcaggtgtgtaacaatgacttttgctgggactgataagatggcatagctggtagcatagttccagcatagttactttgcaatagtccagcatagtttttctaaaatatgtctttcctttctgaaaaaatacatgagcagataaacaatatggaactactgcataggcctaaaacatgtaaagtctcagaaataatagcaaggaaagggaacatttatattttgtttttcttttttcttttctaattttttttttttttttgaggtggggccttgctctgttgcttaggctggagtgcaggggtgcagttacagctactgcagccttgacctcctgggctcaagtgatcctcccaccttagcctcctgaattgctgggattacaggtgcacaccaccatgccccggtaatttttttttcttttgtatttttttgtagagatggggttttgccatgttgcccaggctggtctcaaactcctgaactcaagtgatatgcccaccttagcctcccaaagtattgggattacaggcgtgagccaccgtgcctggcctgtattttctaatgatgtattttacacatacaagaacagaacaaataattatacctatcatgaattttttttttttttaaatgagacggagtttcactcttgttgcccaggctagagtgcaatggcatgaccttggcttactgcaacctccacctcccgggttcaagcgattctcctgcctcagcctcccgagtagctggggttacaggcatgtgccaccacacccggctaatttttgtatttttagtagagacagggtttctccatgttgatcaggctggtcttgaactcttgacctcaggtgatctgcctgccttggcctcccaaagtgttgggattagaggcgtgaaccaccacgcccggctctatcattaaatcttttttttttttttttttttttgaggcagagtcttgctctgtcgcccaggctggagtgcagtggcgcgatcttggctcactgcaagctatccctccctggttcacgccattctcctgcctcagcctcccgagtagctgggactataggcgcccgccaccatgcccagctaattttttgtatttttagtagagatggggtttcactgtgttagccaggatggtctcgatctcccgatctcatgatccgcccgcctcggcctctcaaagtgctgggattacaggcgtgagccactgcgcctgtctatcattaaatcttaatatgccatcttgcttgagtttttttttattttttaaataaagagaacattacatttttactgaaagccttcctaatgtgtttttcccttcttctccctccttcaacagaaaaaagccactgtttgagttaaaggtgtttaaagttcccatacgtgtttttatccttctgctacatctttttttttttttttttttttttttaggatggaatcttactctgtcacccagcctggagtgcagtggagtgatcttgactcactgcaacctccacctcccaggttcacatgattctcctgcctcagcctcccaagtagctgagattacaggggcccaccaccacgcttggttaatttttgtatttttagtagagacaaggtttcaccatgttggccaggctggtctcaaacccctgacatcaggtgatctgcctgccttggcctcccaaagtgktgggattacaggcgtgagccaccacaccaggcctcttacctgcttctaaagggagtacctggccagtgacaaagtatttttcagctttactcttctgttctctgtttttaaaaccattgtagatcatttgatttctactcaggaagtcactgactactcatcttgcaggagtctggatccaattaaaagagagaaatcacatggtaatttgaacagataaggtttaatgtaagaattacttaactattacagagaattggcgtaatgctagattggctaataagaagtaaagaaataagcacatagaaagagggttaacatcatcagccttcaggggagtgtagatcaaaactaccatgagatgctacctcacactctatggtggctggaatcaaaacagcagataagaataagcggtggcttggggccaggcacggtggctcatgcttgtaatactagcactttgggaggccgagatgagcggattgcctgagctcaggagttcgagaccagcctgggcaacatgttgaaacctcgtctctrctaaaatacaaaaacaaatcaggcgggtgtggtggcgggtgcctgtaatcccagctacatgggaggccgaggcacgagaattgcttgaacctgggaggctgaggttgcagtgagctaagaccatgccactgcactccagcctgggcaacaaagtgaaactctgtctcaaaaaaaaaagaataagcggtggcttgggaggctgaggtgggcggatcacttgaggtcaggagttggagaccagcctggccaacatggcgaaagcccgtctctactaaaaatacaaaaattagccgggtatggtggcatatgcctgtaatcccagctactctggagggtgaggcaggagaatcacttgaaactgagaggcggaggtttcagtgagccgagatcatgccmctgcattccagcctgagcaacagagcaagactctgtctcagaaaaaaaaaaaaaaaaaaaaaaaaaaaaagaataagcagtggctcacacctataatcccaccagtttgggatttgaagtgggaggattacttgagcccaggagttagagaccatcctgtgcaacacagtgagaccccatctttacaaaaaatagaataattggctaggcatgtagtcccagctgctgaggaagctgaagcaggaagatcgcttgagcctaggaggttgcagctgcactgagccaaggtcatgacactgcactccagcctggaccgcagagtgataccctgtctcttaaagaaaaaaagaataagtgttagagctggtgatgtggagaaattggaatgctcattcactgctgttgggaatgtaaaatgtgtagccactttgggaaacacgctgtcatttcttcaagcagttaaacatagaattaccatacaaccagtagatgtcattctaggtgtcctagtccattttgtgttactataacaatagctaagactggataatttataaaaaacagatttatttcttacagttttggaggctgggtagtccaagatcaaggggctggcatgtggtgagggcctccttgctgtatcatctcatggcaggacctggaagggcaagagagagtgagggagagagagaaagagactgaactcacagcctcaagcccttttataattggcattaatccgttcatgagggtggagccctcatgacctaaatacctctcattaggcttcacctcccagcactgttgtattggagattaagtttccaacacatgcttttttgggggacatgttcaaaccacagctctagttacatacccwcttccactcttaggtatatgcccaagagtatgtccatacaaaaatgtatacgtgaatgttcatagcagcgttattcagccaaaaagtagaaacaacccagatgtcttgccagctgatgaatggataaataaaatatggtatattcctaggatgaaatagtattcagcaataaaaagcaatgaagtactgggccaggcatagtggctcatgcctataattctagcactttgggaggcctaaagcaggaggattgcttgaggccaggagttcaagaccagcctgggaaacataatgagacccttgtctctacaaaagtaaaaaatcagccaggtgtggtagtgcatacctgtagtttcagctacttgggwggttgaggtgggaggatcacttgagcccagtagttggaggctgcagtgtgatatgatcgtaccactgcactctagcctgtgcaacagagcaagaccctgtctcttaaaaagaaaaaaaaaagaagaaaagaaatgaagtacctataattaaacctttttttttttttttttttttttaatgagacggagtttccctcttgttgcccaggctggagtgcaatggcatgaccttggcttactgcaacctccacctcccaggttcaagcrattctcctgcctcagcctcccaagtagctgggattataggcgtgtgccaccccacccagctaattttgtagttttagtagagacggggtttctctgtgttggtcaggctggtctcgaactcccgacctcaggtgatccgcccgcctcagcctcccaaaktgctgggattacaggcatgagccactgtgcctggctctttttttgttttgttttgagacagagtttcgctcttgtccaggctggagtgcgatggtgtgacctcggctcactgccacctccgcctcctgggttcaagcgattctcctgcctcagcctcctgagtagctgagattacaggcatgtgccactgcgcctgactgattttgtacttttagtagaaacagggtttcaccatgttggtcaggctggtcttgaactcctgacctaaggtgatctgcctgccttggcctcccaaagtgctgggcttacaggcgtgagccacatacccggccccctcatgtattttttttcaagcacactgtaactgattgaataatcagttagtcaacagacagtttttgagcacctaccagggataaaatggtgaacaaaatagacatgttccctgcctggatcagccagaatataaatattaaattattgtaaatacttagaaaattataagtgcacaatgtaatgggatagggatatatgggtgtggtaggactatatgacagggaaacctaacctaaagcctggagacaggtaatgcttccctacagaattaaggttttagctgagacgtaaaagataagtaagagttggctagatgaagtggtggggtcaggagggcttcagcctgacattgggaagtaaataaagcggtgggtcagaagggcttcagcctgacattggaaaggcatgataagttgaaaacactgagagaagctccatgttgcaggctcataaaaagatgaggtggcaagagatgtggaggagaggtgggaaggggccagatgtctaggctttgtttaaggagtctgagactttaccctaaagaaaatgggaaatgtatgaagtttaagcctgggagtgaaataatcctatcacattggctgctgtgtggagaatgaattgggcaggggcaagaatggatgtaggaggcttactaggctattgtagtagtccatgcaaaaggttatggtgacttgaattaggatggtggcagtgaagagggagggatgtgtggcttcaggaagtatttagggataaaatttgtaggacttgattgattatgtgtgcaggatgagagtgaggaggagtctagtgtcaaggctaatttccaggtttcttacagaagcatctgtgaaagggttgactttgattgagatagtaaatgctggaggmagagtaattmctcggggtgaaacatctagatgatgaggtatagcaagaagttacatacttggacttggaactcagaagggatatctaggctgaatatgtaaaatttaggatagtgacatagtttggatatttgttctctccaaatttaatgttgaaatttgatccccagtgttggaggtggagcctagtgggaggtctttgggtcatgggggcggatccctcatgaactgcttggtgcagtccctgcataatgrgtgacttctccctcagagctggttatttaagagggtagcaaccctcycctctctctcttccctcctttttttttttttgagatggagtctcgttctattgcccaggctggagtgcagtggcatgaagtgggctcactgtaacctcagcctcccagattcaagtgattcttctgcctcagcctcctgagtagctgggattacaggcacgcaccaccacacccagctaagttttgtatttttagtagagacgggatttcaccatgttggccagactggtctcaaactcctgacctcaggtgatccacctgcctcggcctcccaaagtgctggaattacaggcgtgagccaccacgcccggccttccctcctctcttggcatgtgatatctgctccctttccgcttctgccatgagtggaagcaccctgaagctctcatcagaagtggatgctgctgccttgcttcttatacagcctacagaactgtaagccaaataaactcgtttctttagaaattacccagtctcaggtatttcttttttctttttttataccagtctcaagtatttcttttttcttttttttagacagagtctcactctgttgcccaggatggagtgcagtggcatgatctcagctcactgcaacctctgcctcctgggttcaagtgattctcctgtctcagcttcccaagtatttgggtttacaggcacacatcaccatgcctggctaattttcgtatttttagtagagatgaggtttcaccatattggccaggctagtctcgaactcctgacctcaggtgatctgcccgcctcggcctcccaaagtgctgggattacaggcgtgagccactgtgtccagcctcaggtatttatttatagcaaagcaaatggactaagagtcagcataatggtggtaaacgaagtcacagaagaggatgacattgctttggggatatctgcagaatgagaatgtragaaagcctaagatagcaccctgagctgctctctatatttaaaattgttgtgtgtatatgtaatatatgtatgcatatatatatatgcattcaaattatacctttagaatgtattactttttggaatgtgtacaaattatattgtgtctagagttggggaatataattgtaaatatattttatttatttatttatttattttttgagatagggtctcactttgtttcccagtctggattgcagtggtgcaatctcagctaactgcaacgtctgcctcccatgctcaagtgatcctcctgcttcagccccatgagtagctgggactacaggccctcaccaccacacctggctattttcatttttttttttttttttgtagagatggggtttcgccatgttgcccaggctggtctcaaactcctgagctcatgccatctgccttcctcagcctcccaaaatgctgggattacaggctattttatttttaaacaaactctgcttgagtgttactatatttgaggcactatgctgataaatgctagtgatttaacagacctaagttataggttcttttttcaaattgtatgctaattatctgcagaggcagaaaaagagacaagatgttttctaaatgctatgatggaggtgagcatgggatgttatggagcacagtcatggtgtagggctgtgattaaggaaagcttgctgaaggaactaacacttgaacacagtcctaaaagatgagtggcaaagaaggcagagaaaggctcttaccacctctcacagttttaggggctgtataaaggtcaaattgcgggaggactgtaaagtgtccagtggatgtggcacttacgaggtcagtggtaaactcatttaccacagtgacaggtgggattagaagccagatcagaccacagagttgaagaattaatgagaagagagaagtcagaagtcctctaaggtggggcctgagtttctgtgtttcggtgtcctcgctgccatgtgtaatccctagcacatagtgtttgtcctattagctttggacagaagagagccacttccctctctgggataagatgcatgtatgtggagaggatgtgtccaaatcgctgtgctccatctgcattctagagggagcatctgcaactctttacctgcatgcttttttcttttttcttttcttttctttcttttttttgagatggagtttcactcttgttgctcaggctgcagtgcagtggtgcaatcggcttactccaacctctgactcccaggttcaagctattctcctgcctcagcctcccaagtagctgggattataggcatgcaccatcacgcccagctaattttgtatttttagtggagacgggttttaccatgttggtcagactggtcttgaactgacctcaggtgatccacccacctcggcgtctcaaagtgctgggattacagcatgagccgctgcgcctggcctgcatgcttttttctgaccatacagggaggccaagtgcagtcccacagccagaattctctgtcttaaatctacttctagcatttttattttttatttatctttttctgtctctcatggttgagtgcctgatactcttattaaatttaattaattaattaatttttttgagacagtgtcccactctgtcacccaggctggagtgtactggcatggtctcagttcaccgcagcctccacttcccagtcttaagtgatcctcccacctcagcctcctgagttgctgggactacaggcacgcaccaccgtgcctagctaatttttgtattttttgtagagacggtttcgctatgttgcccaggctaatctcgaactcttagggtcaagtgatgtgcctgccttagcttcccaaagtgctgggattacaggcgtgagccatcgcacccagcctcacgttttatttttctcatttagtacgataccaaaagcatttctctataccattaaaaaatttttttaagtttatgcagccatttaaagtggctgcataaactctcatttagatgtttatttgaacatttagtttaaaattcytttccctttttaacttttcattttgaaataacttcttatttacaaaagagttgtagaaatattacaaagaactcccatatgtccccttcagctagcttattgtgatgtctgtcagatttctcaacttcaaagttactctgttcccctctgttaataattagtgaggaaatagtttaaaactattttatatcttattttttatttatttatttataagagatagggtcttgctctgtcactcaggctggagtgcggtggcatgatcttagctcattgcagcctctaactcctgggctcaagtaatcctccctcctcagcctcccaagtagctgggactacaggcacatgccactatgcccagctaatcttaaaattttttctagaggtggaattttgctgtgttgcccaggctggtcttgaactcttggcctcatgtgatcctcctaccttggcctcccaaagtgctagtattacaggcatgggctactgtgcctggcctatatcccatttctttttcttttcttgagatagagtcttgttttcttgttcaggctggagtgcagtggcacgatcttggctcactgcagcctccgcctgccgagttcaagcaattcttctgcctcagccacacaagtagctgagattacaggtgggtgccaccatgcctggctaatttttgtatttttagtaatatggggtttccccatgttggccaggctggtctcgaactcctgacctcaaatgatccgyctgcctcggcctcccaaagtgctgggattacaggtgtaagccattgtttctggccctgtatcccatttcttgtaaaacttgtatgcattaattttagcatccattgatgtttcttgggtgaattattactataatggttcctaaatggtgattttctaattacattattccttctattttcatcagctgtcgtttcactctgagagctttctccccctttattagattcttatttaatggattataatctgttattatcagtctttatcttgatgctgaattgctccagatctgaccagtgggagctcctcaggctgattcctttttccttttgacctgtcctcactctgagcattttcccattttcaggcacaacaaggtggcccagacttaccttacgccttctctgccccagccttggagtcagccattcttccaaggagacctgcttccttttttttttttaagcaattgtttattacactcctgctatatgctataagatgatgagcaaaaccagacacaatttcagccctggaaggagaaaagggaggtcgatattaatcaagtaataacattaatgggggcatttctcaagtgagagaagtgcactaaggaaagaaatgtgattctatggtagggtaataaaagatccttgactggggaggggcagcataccagtaattaactgatctgaagaatcagtagaaattaacttggtaaaaagtgaaagtggatggctgagtgggaccagcattcagaaggcaggtgcctgcagagaaagccatcagttttaacaagaaatgctgtatcagagatgaaactaaacctattcctcatcttttcttcttgcttcaaacataactttgaaaaatcatttatgctgtctttagcctcatccctkccccaaacttcacattgttctgggttttaggtgtctcaaaaawtttttttttctcccggaagacccatgactcctcttgaatattaagtgcctttttctatctgtgtcctaaaccttttttaaaaaaataatttcaacttttattttcaattcagtgatacatgttcaggtttgttacatgggtattgtgtgatgctgagatttggagtatgattgatcctgtcacccatgtactcagcatagtacccaacagttcatttttcaacccttgcgccttcacccctcatccccatctagtagtctccagtgtctgttattgccatctgtgtgtccgtaagtacccaatgtttagctgccacttacaagtaagaacatgtggtatttggttttctgttcctgcgttaatttgcttaggatgatggcctccagcagcaaccatgttgctgcaaagacctgaattcattctttttttatggctgcaccctgcttcttgttagtggagaatagtatttcaaaaccaagatctacggaggttatcgtgagctgaaatcgcaccattgcactccagcctgggcaacaagagcgaaactccttctcagaaaacaaaaacaaaaacaaaaacaaaaacaccatcaaaatctaggtactagatatgcttcatgctgttgagatatgaccactgccagggtctttctgtgggcagagctaaagagttatatgttgggggggtgggcacagtggcgcacgcctgtaatcccagcactttgggaggccaaggcaggaggatcatttgagtctaggagtttgataccaacctgggccacatagcaagaccctgttgccacaaaaagttaaaaaaattttagtagctgggcgtggtgacacgtgcctatggtcctacctacttgggaagctgagatgggaggatcacttgagcccaggaggtcgaggttgcagtgaggtatgatcacgccactgcactctggtctgaatgacagaaactgtttaaaaaaaattatatgtgtgtatacacacaaatgtacacacactatcctcactatatttatttttatgtctttgtatatataacacacatatatacacwtatgtatacacacatatgtacrtatacacacacacacatatatatttctgtattattgttcgttttgagacagagtctctctttgtcgcccaggctggagtgcagttgcatgttctcagctcactgcagccttcactgcctaggctcaagtgctcctcccactgcagactcctgagtaactgggactacaggcacatgccaccaggcctagctaatttttaaattttttgtagagacaattatttttcttttttttttttttttttgagacagattctcactctgtcacccaggctggagtgcagtgccatgatctgggctcactgcaacctctgcctccccagttcaagtgattctcctgcctcagcctcccaagtagctgggattacaggtgtccactaccacgcccagctatcgagacaattttttgtaaagactatattgcccaggctggtctcaaactcttgggctcaagtgatccttattccttggcctcccaaagtacggggattacaggtgtgagccaccatgcctggttatatattaaaaaccatttttttcccactgaatacctccaatttcaatacaagtcaaaatattaattccagttttccctttccatatttgtaactttcttctccatcattgggaaatcttgttcccattagcttcaatacatttacttatctggtcaatcccaaatcacctgttgccacaacctagacccctcacatggactaatgtccctctctcccctttcaccccaggcatgtgtgactctccctaaagmctactggtttttagattatttagaaaggaagggatagagggacctcatttygtttatggatgcatagtacctattttgtgtatgtaccatagttgattcaayccttgttgaaggacatttggagtacattgaatcttactctgttacgttacaaatagtgctacaataagtggccattcacataagactttttgtatttttgtcagtgtatctttgggatagtttcttagaagtgagactattgggttaaagggttaaaagcatgtgtaattttgttagatattttcaaatcccttccaccaccagtaatgtatgaaagcctgtttttaccccacagcctcacttctagaatgtgtcagacttttgtcctagcggcgagtttgaaattacatctctcacaggatctcgggatattgttctccttgtcttggaggctttggcttcctttaagctcttttttgctcttttgtatgttgtctacttttggaaatcagtttcctccttgggatttgttctactcttgtcatttgaagattgttttccctaatggaaaagactgaaataaaacaggtgattacttcagccttctcactgccatatttgttgaaaagaatggctgcatctgttgactcactgactgttgtgtgtctgccagagccttgggctgtggtcactgtatggttgtgacaattcagcatcacatctcttgcatttggcacagaaaggagaggggtggtgccagccacttctgcccccttctaaaagaaaagaaaattctttctaagagccacttgccttttgtgcgcagactacttacaacttaaatttttagttgttctcagtgggaagtttggacaagatatatagttccttgtgtagttagaaatacaagtttctgatttctttttcttttctttttttctttcttttcttttctttcttttttttttttttttttagacagagtcttgctctgttgcccaggcgggggtgtagtgatgtcataatggcttactgtaacctcaaacttatgggctcaagcaatcctcctacctcagcctctcaaatagctaggactacaggcccatgccaccatgcctggctgatttttaawttttttctggagacaggatcttactatgttgcacaggctggtctcaaattcctggcctctcaaagtgctaggattacaggcatgaaccaccatgcctagccatcaagtctctgatttctatttcacttaaaactttatgtatttacttttacaaatataaacattaaaaataaatatatggataaataaataccttgtcaaagtattccatctgaacccacttttcagagataattattgtcaatagtttggtgcatattcttttatgtatgtactagatacttagtcttattttttttttctttgagatggcatctcactctgtcatccaggctggagtacagtggtgcaaccttggcttactgcaacctcaacctcctgggctcaacaaatcctaccttagcctcccaattggttggggctataccaccagtacaggcacataccaccatgcctgaataatatttttttatttttattattgagatagagtctcgctctgtcgcccaggcttggagtgcagtggcacgatttcggctcactgcaacctccgcctgctgggttcaagcgattcccctgcctcagcgtcccaagtagctgggactacaggtgcgtgccaccgcacccagctaatttttttttttttttttttttttgagatggagtcttgctctgtcactcgggctggagtgcagtggcgcgatctaggctcactgcaagctccacctcccgggttcacgccattctcctgcctcagcctcccgagtagctggggctacaggcgcccgccaccatgcccggctaattttaatttttttttttttttttttttagtagagatggggtttcactgtgttagccaggatggtctcgatctcttgacctcgtgatccgcccacctcggcctcccaaagtgctgggattgtaggcgtgagccactgcgcccggcctaattttttgtatttttagtagagacgggatttcacagtgttagccaggatggtcttgatctcctgacctcgtgatccacccaccttggcctcccaaagtactgtgattacaggcatgagccactatgcccggccctgactaatttttaaaaaaaattttttgtagagacagggtcctactgtgttgcccaggttggtttagaattcctgggctcaagtgatcaaccagcctcagcctcccaaagtgctgggattacaggtatgagtcatggcgcccggcccttaatcttaatttttaaatattattgtcatcttcgtttgttgttgccagtatggggccatatatgtacatactattctacagctagattttttttcacttagcagtaggttctagacacacttccctgttagtacatgcagatatgcctcattctttccagctggtacattatattctgcactgttattctcctgccctggcagatactttattcaccttcgtttcttctgtgtactggcagctggtctctgttacctgcatcatctgggcttccttgccttctggcttccagctgggatcagctgataaaagacactgccaggagatctgagggccaatgttgggaggagtcagactatgttttatcccccactgtcccttgccatggttctagtagcagctgtgctcgttatccgtgatcactgctcttgtagggtggcttctcttctccagccagctcttgctgggctccagtgacacccttctcttcttttgccctttgaggttgaagggtagaaatagcttcctgccgtttctagtccctggctgcttcaccattccttgttggttcctttaaatgctgctcacaacagctataaaaaatcctgtcattaaactgccttcagtttactcctttgcatatgccatctctttcctgctaagacctcaatggatgtgaccagggagacttaccataatttaattattgggtccctattattgggcatttaaactgtttctagtatcttgctgttatactcagagttgctaatgaacattcatgtacatgtcctttttaatatttgttggagtattgtttgagaaaaaagtcataggaatagaaagactgggctaaggtatatgaatattataaatttcartagatacttctaaattgttcccaaaggagtctaccaatttacatttctacaatgtgttgtttgatttttttaatagtaaaaaattaatggaggcagtacttgtgacttcataaaaaatacttttttttttttttttaagagacagcatctctctgttgcccaggctgatgtgcagtagcatgatcatagctcactgcagcctcgaactcctcaagcagtcttgaggcgggctcaagcaatcttcccgcctcagcctcccaagtagctgggactataggcacatgccaccatgtccagctaatcttaaaattttttgtagagatgggggtctcatctcatcatcttgcccaggctggtctcgaactcctgggctcatgcagtcctcctacttcggcctctcaggtctgagctgccatgctaggccctatgacaaataaatttaattcagaagtgtacaaagggaaaagtaaaagtcctctgagtctcacctgcttctcatcatcccatcctattccctacaggtaagcatgctaacagctgtatagcctgtcaggcctttctcccatttttatatgtacatgcttagcgtagagtaaattgagtacatttatatgtataaagtaaactcattcgtatgtgtgcgtatatgtatctctttctctatttgagataacatatttctagactctgttctcttccattgacctgttttttcctctgccagtacctatctaccttagtaattatagctttgagttggttcgatatctggcaaggcagattctcatcccattatttttcattttaagaaatttcttggcccttcttgggcctgaactcttcagattatctttagatccaagttcagaaaattcatggattttgactggaatgaaactgaatttatagaaaactcacatttcaggaaaactgacatatttcaaattgaatcttctcacttaagaacctctttcaccgggcgtggtggctcacgcctgtaatcccagcactttgggaggccgaggtgggtggatcacgaggtcaggaggccatcctggccaacatggtgaaaccccatctctattaaaaatacaaaaaaatcagctaggtgtggtggcgcgtgcctgtaatcccagctactcgggaggctgaggcaggagaatcgcttgaacccggggaggtggaagttgcagtgaaccgagatcgtgccattgcactccagcctgggcgacagagggaaactccatctcggggggtaaaaaaaaagaacctcctttgtctctttatttactcagatattttatgttctttggtgaaagtcttgcccatttcttgctaagtttatttttagttattttatagattttgttgccatcatgaatggaattttttcactttatgttttcttttctttcttctctttctttcttcttcttcttttttttttgttttttttttttttgagacagggtcttgctctgtcacccaggctggagtacagtggcacgctcacaactcactgcagcctcaacctcctgggcttaaaggatcctcctgcctcagcttcctgggtagctaggaccacagatgcacactactaggcctggctaactttttaatttttctttttgtagagataggatctcatcatgttgcctaggctggcctcaaactccagggctcaagcagttctcctgcctcagcctaccaaagttctgggattatakgcgtgagccactgtgcccagcccacctaacattttctaattggttattgctggtatggtttttaagaatgtgttgatttttgtaaattaatcttataatcataatcacctactttattgaacttcctattctaatgattttttagtatattctcttggctttcctaggtggacaattatctgtaaattataatgttttgtcacaccattattaatatttatacatcatttttttctcttatgtcattgtaattttgtggctgagatatctgattgggtttggttgagggcctgacccagggcagtcttcttggccaatgttacattttacatttaaggtgtacctgctatgcatccttttacatcaaaggatgcatagcaggtacagtagcagggtgrgtgaattccagacagaccttgaggatagaaacaaggcagcattcaatgaatagaaagtacaatgactagagcatagggcacaaatgaggttgagagaagcaagagatggattggagagtaaatcgaggctcagtcagaaaccgctaggctgtaaggagcaattactttattcagaggagttgagaattgaatgaaagctatgttaggcagaatggctctttaaagatatccacaccgtaatccctggaacctatgaatttgttactcgacatggcacaagggacttcacagatataattaaggttttgggtcttcaaatagggagattatcctggattattaaggtgggcccaatataatcacatgggccccaaaaagcaaagaagtttctccagctggaagagaagcaagatatggcggagggggaatttggagagattcaaagagtgagagagcctgaaggggaccacatggaaagcatgaaaaggactgtaggcctgaaggctggcccctggcagataaccagccgggaaacgggggccttgtccctacagctgcacgaactgaattcagccaacggcctgagtgagcatggaagtggattcttctccagggcctccagaagggaacacagccctaccagcaccttggttttggycttgtgcgactctaagcaaggatccagctgagcctcaccatatccagattttggccttcagaactctgagataattttgtgttgttttaaactgctaagtttgtgacactttgccacagcagcagtagagaacgaatgcaaaggggtttaagcagggatattgtcagattttgtgttattaaaagacttcttgtgccatgtggaaatggatttggagaatgtaaatttgaaggcagggaaacgtgtttgtgggaatgctgtgataacacaatctagggtagtgatcatgggaaggggctatgatttgaaaaatatctgggaggctggaattgccagaactagtcagggactggatgtcggcggctggggtggggaagcaaagatgattgctgctttctagcttaggcgctggctgatgatgaagctgttttttgagatggggatgagcaggttagaagatgccatgatatgaaagtgataactctaagttattcttcatttggaaattctctctatagatactttaagagagaatatatcaataagatgagtgctttgtcttttaagaactaaactttttcttttctaggtcatttaggaaatcgtaaatcatgtgaagatgggactcttggtatttgtgcgcaatctgctgctagccctctgcctctttctggtactgggatttttgtattattctgcgtggaagctacacttactccagtgggaggaggactccagtaagtatagtcactctagctcaccccaggagaagcctgttgcaggtcagttactggtttttcgtgtggctgcgtctcatattcttcagagatgggcaatgagagtaaactgaacatttctgggactttggcctagaaattgcctgccattttagctggtataggctgagaactttgatgttttttaaaaactgcatgccatgacaaatctcagttccttttacaaacttggtgagaatgtgctattcttcaataaaaacccaaactatactcatacttctagttcttgaacgcttttgttctttctaattgctgtagcatattgccactctattttgccatttattgccttagggattagtattgaagttggtttccatctgcccttaaaacattcatctttatgttgaattttcaacataatattgtctctgttttgttttccctaaagaaacgttgtctactgaatctttgtagccgttgctgctattgaacttgcacctggctacaataatggcttattttccctacccagtaactcctaatttttttcttctctttgtgcactttgtctcatgtgttacatagtgttttccacatagcctgaatcccactggtttggtttctgtttacctgatgtggcctgtgttttggttctaggcttgcagttgaagggcttacrttgatcagcaccagcctttgcacattgttttcttggctgtagcttgaaatatcacacagtgaccatagtggttttctttttggttattttgtctgactgttatctgagcttggtgtgggaaatagtataaaatcagaacagagtggcctgttttgacctgcagtgatatgtcttctcttaaaatagttttatttttactaacatctaccagataccagtatagaactcacttgagaagagagtcagtctctaggtacraggtgaaagtgagctgcagtgagtgggaagaagcaacgggcaattggcctgctgttgttctaagaccctaacatgggaagtattacagtgaagtagctcatttatttctcccatggctcaaactactgaggcagtttcaagccagtttttaaaatatagtgttatatccttaatttactgttttatatagaatatttaagtgccttttaaatgcttagcttataattatcactaattacttgtgtttcaaaagtttacttaaatttctctgcactgacttatttttaaaaccaaggagactacccaggataaggagtgtttgtatcagtgaaatgcagaattctgtatttagaggcattcattgtctgtattggtagtggtggatccatctctatcaataatttagatggaaatgtgtgtgaagaacaagggtctccttttccgctaagggctgctgacctgtagaagatataaccaaggatcagataagattttcctagatcagtagggaagggaattaactttatggaagactcattgtgtttcaggcattaggctagacaatttacaaatataatttcatttaatgtaattcttactgcagttttgtgaagatgccattattatccccattttccagttgagcaaactgaaacactttaatttaccaaggttatattgttggaactggaattcaattcctgtctttaaaacctatgttcattattttattgaaaaatataataaatactgaaggcagaacttaatttaatattctacctggtaaaaagagagagagaaaggggctcagagaagtaatagtagagagtgtcaggaagggggtgtgaaaagaaaaggagggaaagagagaaagttatcaaaagaagacagagaggcttattaggtttgaaggtgacaagctgctattcacttgggccgtaggcttcagaagtttattgctagttatctgctgtcctttccattaattgttagctgactaaccagtatttatagcttttctattctgactcctaagccttttagatgtttgactttgaataggttgtttagaccatctgaccaaagcatactattttatgtgctgtaatatcagagaacagagtaataggacccaccctgcatggcttactaaatcagacgggtcctctttgttttttttttgtttttttttttgagatgaggtctcactctgttgcccaggccagagtgcagtggtgcagtcatagctcactgtagcctcaacctgccaggctcaagcgatcctcctacctcaacctctcgaagtagcygggaccacagactcacaccaccattcctggctaatttttgtgtcttttgtagagatggggtttagtcatgttgcccaggctggtctcaaactcctgggctcaagtggtctgcttgccttggcttcccaaagtggtgggattccaggcatgagccactgcgcccggccggagaggagtcctttacttagagtcaagctgaaggagcatcacaaccccaaagactgttatgttgtgaaatttaggctgtgttttaataatactgatgatgataagatgaaatagtaatttattgattactatatctactatatgtccgtaagatagcagggtctttatactcggaatctcatttgatcctcatagtttttattggttattattatcctcattttacagatacagaaactgaggcttcagagaggctgtgtaatcaagagtttgtatgcctttcatctgaggaggttgaggacaatcccaagttagaaaaataaatgtctttagcattatttttccttaatgtttagaatattaataagttactcagataatctattggaatttcttcatggcagggggaagaggctagagttggtttttggtttttgtttttggcacagggtctcactctgtcacccaggctagagttttgtggtgtgatctcggctcaccgcagcttcaacctcctgggcttctacctcagcctcccaagtagctgggactacaggtgtgcaccaccacgcccaactaatttttcaaaatttttttgtagagatggggtttctccacgttgcctaggctggtctcraactcctgagctcaagtggtcttctcacctcagcctcccaaagtgctgggattacaggcrtgagccactgcacttggcctgaggctagagtttttattattatattattcattcagtaagcagtatgttcttattatggtccatgtactgttctgggtaaactggatataagatgaacataggccttcatactcttagcctataatatgagaacaaaacacaacaattattataatatactgagttctaaaagagcaatctgtgtgaaatgctgtgttggagcataggattccttccagagagaaaatttatgttttcattaattccaaggtgtattgtagagggctacaaactgctttgtcttgggtagtttagagacacttgtgacctaggcttggtcaggttgccaagacttgagtcaaatgcttaatgtgaaaagcttcaagtatgaaaatagtctagttatcaacctgttttaaaaagtagtgtagaattattatacatgtagtatgataaaatatgtacgcatacatatatttttaatatatattttaattaatgaacaaatcaccagtatctggagttagaaggagttgggtgtgcttgattcttcatctccaaaatgaagataaaagacttatttcttggccggacacagtggctcacacctgtaatcccagcactttgggaggccgaggtgggcggatcatgaggtcaggagatcgagaccatcctggctaacatggtgaaaccccgtctctattaaaaatacaaaaaattagccaggtgtggtggcgcgcccctgtagtcccagctacttgggaggctgaggcaggagaaccgcttgaactcgggaggcagaggttgcagtgagcctgggccacagagcaagactcagtctcaaaaaaaaaaaaaaaagacttatttctctttgctctgatgctttatttaggtcagtaccttgtataggagtcgggtagttgcctctttgcaatagcccttatttcacaatggttcatttcatggaagccttgcatatttttattaatttaaaattttacttatttctgctgggtatggtggttcacatctggaattccagcactttgagagactgaggagggaggatttcttgaggctgggggaattatttgaggccaggagtttgagaccagcctgggtaatgtcacgaggccttgtctctacaaaaaaattaaaaaatattatccaggcatagtggtgcacacgtgtacggcgagtggtatagctactcaggaggctgaggtaggaggatcacttaggcccaggatttcaaggttgcagtgagctatgattgtgccactgtactctaacctgggcaacagcatgaaaccttgtcttaagaaagaaagagagagagagaaagagaaggagagagggagtgagggagggaggaagagggagagagagagacagagaaagggagcgaggaagggagggaggaaagaaggaagggagggaggaaaggaggaaggaaggaaggaaagaaggaaagaaattcatttctaattaataaagtagatctttcataggattagtttcctgtgctgtgagacctttaaaaattcatgactgggtgaggtggctcatgcctataatctcagcacttttggaggctgaagtggaaggattgcttgagcccaggagttcaagaccagcctaggcaacatagggagaccctgtctccacagaaaaataaaaaaaattagctgaatgtggtggtacatgtctatggtgccagctactcgagaggctgaggtgggaggatcgtttgagcccaggaagtcaatcaaggctgcagtgagctgtggtcacgccactgtactccatccagcctgtgtgacagagtgagaccctgtctcaaaaatgttttaaaaattaaattcatgctactgtgtttatcaattattacagctccctttgtgttcttcctcatatttataaaagattataaccagataaattataaaatatgcattcaaattataaagtacacattgttgatctgattgccctggagaatactctctggcacaaaagcggaagttggatctgatattaggaggacaggttgaagtgagtttaatagacgtaggacattgtattaactcttagttttctgtcttaaaaatgaagaggaggctggcatttctggccatgtttctggcctctggcttagggaggtactctgcttcccatggtaaggaagtaagtggtatcagaactagcctcctctctataggaagctataaaactggacaaaagaaatgaagcaattgtgtcagcctgtagacaacaggcagcgtaaaatttcagttcctaagagaaggaaaactcgaggtgagcgccacatttgctcagttttctgtctgaggacggtttcccaaccctgttctgtgagtggagtytaaacaggctgtgatgatttcccctgagctgaagaggcagaggtcagagtttgggcagctgaagcagttggaatctgtggggtggaccatcatagggtagggaattgttcagcaagagggtctcagaagtctgtgggggcattcctgtgaggctgaagctaaggactggcctattatttatacatggggtgaagccacctgaagcttaccatatagacagcagctggtacaggatgaatagaaaagagatactggaggtcaagtcctgttggggtgaaagcaatgccaggaacgctgatggtccagccctaccagtagaaagatctcattaacactttgttaacamccctggcgtccagctgagaccccagacaggccatgccttatgaataaagatcttacccaagagtaagatctaccgtagacccgccctaacaaggcctaaagccaacccccagcaagacagatttcaaagtttgggtcttatcaagagaggtcaaaaatgccatgggctttcctcagatccacactcatgatgcataaaatcaagaccacacaaattcagggcygtcaggtagtcattgaaccatctgctaaaatacaaattgacactcttcataggaagataacagtattcatagtttttatgtgtaatatccacagtggctaatgttcaaaaaaagttactaagacatgcaaagaaacaggagaatatccatattcaagaagaaaaatctatggataagatggcckcagtgttgcacttagcagacaaagtaactattatgaatatatttaaataattaaaggaaaatacagtagtgaacaatgagtagtctcagcagagaaatggaatctataaaaaagaaccaaatgcaaattctagacctgaaaagtgtagtaactgaaatggaagtttcacttaacagcagattacataaaacggaagaagcccatgagtttgaagagaacacaatggaaattatccagtctgaaccacagaaagaaagatcgagaccatcctggccaacatggtgaaaccctgtctctactaaaaatacaaaatttagctgggcctggtggcacgtgcctgtagtcccagctgcttgggaggctgaggcaggagaattgcttgaggcggagcttgcagtgagccgagatcgcgccactgcactgcagcctggtgacagagcgagactccgtctcaaaaaaaaaaaaaagacaattgggcaggaaaaaaaataacattttattttttgaaaattaatttcccatacttactcatctgaaggaaaaaaaaataaataatggctgaaaacttcctaagtttgatgaaaaccattgacttacagaaccaaaacagagcccccttatagagccaaccccaagaaagataaatattgggggaaaaaacctaggtacatcatagttagacttctgaaatctaaaaataaggagaggctgctgctggtgctgctgatgagctcatttggtgtggacatggtgcctctttagtgaagyagcaactgatatctctggtgttccctgtggcccatgaaatgccaagagaggtgtcaacacttaagagcaacgatcatactaatttgaaggtggtggggcagattggttctgtggtgcagtttaagattaagagggatacaccatttagtaaactaatgaaagcttattgtgaatgagagggtctgtcagtgaggcagatcagattcccatttgacaggtggccaatccatgaaacaggcacacctgcacacctggaagtggaagatgaaagtaccattgccatgttccagtagcagacaggtgtctactacaaaggaacctgctactttagtccagaactccattcttacagagcaacaatacattctcagttagaaaactgcaatttggttctgccacatcctgactactacagtatagtattctctattctttcattccccccccccccattcctatattacatgtagagtaagtggtgtgtgtacacacgcatattgtacttttaagaaaacaaaatggccaatggtatgttttgattaccatcaaatggatatgggatggggaaagatactggttctgtgaaaatactctttctccattagtggcatgcttatctttatattccagtaacttaatttcctctcactatttcaacaaaaaagccaacatgaaaaatccttgcataccttgtttgattggagaattttaatgttttttatttatcatcataaaaccaaagacagttttacaattttttgtatgtaggtgtttcatatagagaagtctgtctttaaggcgggtaattactcttaaaaatgaatcctagtttttccttcaaatcaagcatcttcttttttttttagacagaatcttgctctctcgcccatgctggagtacagtggagtgattttagctcactacgacctccacctcctgggttcaagcgattctcctacctcagcctcccgagtagctgggattacaggcacccgccatcatgcccagctaatttttgtagagacgggatgtcaccatgttggccaggctggtctcgaactcctgacctcaggtgatctgcccgcctcggccttccaaagtgctgggattacaggcgtgagccaccacacctggcggcatcatcttctttaaataaacttctcgtttaaaaaataaagagtgagcttgcagtgagccaagattgcaccactgcactccagcgtgggggacagagcgagactccctctcaaaaaataaataaataaataaataaataaataaataaaataaaataaaaaataaaataaaatataatagcctggcgtggtggtttatgcctgtaataccagcactttgggaggctgaggcaggcgggatcacctgaggtcaggagtttgagaccgtgaaaccccatctctactaataataatacaaaaattagcttggcgtgatggcatgtgcctgtaatcccagctacttgggaggctgaggcctgagaatcgcttgaactcgggagacagaggttgcagtgagccaagatcgtgccactgcattccaggctgggtgacagagtgaaactgtgtttgaaaaaaaagaaaaaagaaagaaagaaagaaagaaaaataggctcatgcctgtaatcccaacactttgggagggctgacttaaggtcaggagtttgaaatcagcctggccaactgggctatacaggaaagatgaagaccactggaaatggtaaatggtaggcaaatatgactctctttccttcttctcataactttcttaaaagacaactaattgtttaaagcaaaaataataacccagtaaagtgagattttggacatatgtagaggtaaaagatatgtcaacacttgcataagggatgggggatgggtaaatgtaattttactgtacaaggttatatttgtgaaaaargaagtaagtgggaaacaagaatgttttatataaagtgagaaaaggaaagggtaaagtaataaatatgaaatgtcagatttgaagaggtattatactgactctaaatagactgataagttaaggatgagtattgttagctctagaacaactacttaaataacacaacaaaaagagacaaacagtcatacactgcatagcagcattttggtcagtgacagaccacatatgcaaaagtggttcygtaagattataatatcatatttttactgtagcttttctatgtttagatatgtttgattgattgattgagacagaatctcactctgtagcccaggccagagtgcagtggcatgatcttggcttactgcagcctccgccctctgggttgaagcaattctcatgcctcagcctcccgagtagctgggactacaggtgcatgccaccacacccagctaatttttctattttcagtagagacagggcttcgccatgttggccaggctggtcttgaacttctcacctcaattgatctacctgcctcagcctcccaaagtgatggcattgcaggcatcagtcactgcgcctgacctagatatgttttgatacgcaaataccattgtgttacaattgcctacagtatttcagtacaatcacatttctaaatacactctatgatatttgcacaaygacgaaattgcctaacagcgcagttcttagaatatatccctgtcgttaagtgatgcatgactatatctgagaagctatcagaagaaataaaatggaatactaaaaaatatttagtcagtcccaaagaaggaaggaaattttgacacatgctgcarcatgggtggaccttgaaggcatcatgttaaatgcgtaagccagtaacaaaaggacaaatactgtaagattcctcttatacgaggttcctagagtagtcaattcatagagacagaaagtaaaacatggctgccggagactggaacagaggggagcggagagttcaatgggttcagagtttcagtttataagatgaaaagagttctagggctgcatggtggtaatggatgtacaacagtgtgaatgtacttgatgccacagatgtgtaaacttaaaatggtaattttttttttttttttttgagatggagtctcactctgtcacccaggctggagtgcaatggtgcaatctcggctcactgcaagctccgcctcctgggttcatgccattctcctgcctcagcctcccgagtagctgagactacaggagcccrccaccacatctggctaattttttgtatttttagtagagatggggtttcaccatgttggccaggatggtctcaatctcctgaccttgtgattcacctgccttggcctcccaaagtgctgggattacaggtgtgagccactgcgcctggcctagtttttgtttttttttttgagacaagtctcactctgtcacccaggttggagtgcagtggcgccatctcggctcactgcaacctctgcctgctgggttcaagcaattcttttgcctcagcctcccaagtagctggtactacaggcatgtgctaccatgcctgactaattttttttggttgtttagtagagacggggtttcaccatattggccaggctggtgtcaaaatcctgacctcaagtgatccacctgcctcagcctcccgaagtgcgaggattacaggcgtgagccactgcgcctggcctaaaatggtaaattttatgttgcattatcttaccacaataaaaacgtaaaacaaaaaaatgaggccgggcacagtggctcacgcctataatcccaccactttgagaggccaaggcgggcagatcaccaggtcagaagttcgagagcagcctggccagcatggtgaaaccccatctctactaaaaatacaaaaattagcctgccggacatggtggcacgtgcctgtaatcccagctactcgggaggctgaggcaagagcatcgcttgaacccaggaggcggatattgcagtgagccgagatcatgccactgcactccagtctgggtgacagagtgagactccatctcaaacaarcaaaccagccagaggcagagatacctggggtgaaggatggggaaacgggcccagggcttccatgctgtctccaggcatgccactctccagcacctccacgtgttcaacggtctgggaactctgcagaccccatagctcagggatttttttttttttttttttttttgagatggagtctcgctctgttgcccaggctggagtattatctccagcctgcaatggcaccatcttggctcactgcaacctccgcctcccaggttcaagcaattctcctgcctcagcctcccgagtagctgggattacaggcgcccaccaccacctctggctaagttttgtacttttagtagagacagggtttcaccatgttggccaggctggtctcaacctcctaacctcaggtgatccgcttgccttggcctcccaaggtgttgggattacaggtgtgagtcaccatgcttggccagctcagggatttttatggaggattcgttacgtatgcaggattgactaaatcactggtcattggtgataaactcaacttttagccctccaaacacattgttggttcccctggtaaccagccctcatcccgagggactgtccaggaacccactaagagtcacctcattagaacaaaaaatgctcctaccacccaggaaatcccaagggatttaggagccctgtctcaggaactaggagcagaaaccaaatatatatttcttactatataacaatatcacacaatatataaaactcagttgcgtttctatatactggaagcacacaaatagaaaataagattaaacaacattatttgcaatagcatcaaaaaaataagatacttagaaataaatctaaacatatgcaagacctctacactgaaaactataaaaatactgctgagaggaattaaagatctaaagagattaaataaagacatctaaataaggagagatttatgatgcctatgtattggaacacttaatattgttaaaacagcccccattttttttttttttttttcttttgagccagagtctggctctgtcatccaggctggagtacagtggcaggatcacagcttactgcagcctcaacctccccagtttaagcaatcctcctgcctcagcctcctaagtatctgggattacaggcatgcccagccaatttaaaaaaaaaatttttataaagacagggttttacattgttgcctaggctggtcctgaactcctgttgtcaaacagtcctcccaccttggcctcccaaagtgttgagattacaggtgtgagccaccttgccagacctgtttttaatttttatgttttatttttgcagagatgaggttttgagttgttgcccaggttggtcttgaactcctggccttaagtgaagatcctcattctttcaagattgatctatagattcatgcaatcctaattaaaatttcagcaggcttaaaaaaagaaatcaatagctgattctaaaatttatatgaaaacacaaagaatctagactttggaaagtagaagttagagagcttacactacttcacttcaagtcttactgtggtaatcaggacaatacagtattggtgaaagatcagtagacagaatagagtccagaaatagaccatgcatatgtagtcaattgaattttgataaaagtaataacataattcagtgggatagggagtcttttcaatatactctggtgcaataactagatatctatatagaaaaataaggaaccacaattcctacctcacaccatatacaaaaatcaattttaagtggatcgtagacctaagtgtaaaatttatagaaaaggagaaaatcttcatgctgttgtggtagcacaaaaagcattaaccataaaagaaatatttatcaattgtatccattgagattctttctgctcttcaaattgttccatcaagtaaataaaaagcaagccacatgctgggaaaaatattgacaagatacattgggcaaaggacttggatccagaagatataaggaactcttacaactgaataaggaggcaaacaacctagttaaggagttgacagagtacttttgggagaccaggtgggagggtcacttgagcccaggagttcaagatcagcctggamaacacagtgataccccatcttaaacaaacaaacaaaaaaatgaacaacaaaaagaaactgacaaaggacttgaacagatatttcatacaaaaaaaattacaaatgactgataagcaccttgctatggtttgaatgttcttgtcccttccagaaattcttgtgttagaaactcartccccagtgcaacagtgttgggagatgggaccctttgggaagtgattgggtcatgagtgctctgccctcataaatgaatgaatgccattataaaaagggcttgacagagagagtttggtccctttttgccccttctgccttctgccatatgaggacacagtgtttttcccttcctgtggatgcaccgttttaaggtgccctcttggaagagaatactggggcttttccagacaccaaacctgctaatgttttgatctttgacttcagaatctctagaactatgagaaaataaatttcttttttttcaatataaattacccagtctcaggtattttgttatagcacacagagtggattaagacacacctcaaaagattcatcatcattagacgtcagggaaagcaaattaaaacctcagtgaaatgccacttcayacccattagaattgctgaaatttaaagattagcatgcttcaacttagcaactctcttgtgttttcaaatggagtgtaaaatggtacaaccactgtggaaaacaatttggcaatttcttttaaagttcagcatatgtttagtacatgactcagcaactcatacttcccaagataaatgaaaacctttgcctacaaaaagagttgtaaacaaatgttggtggcagctttattaacaatagccaggtactggaaacaacctaaatttccatcagtaggtaagtaaaacaaatatacaccttagacaaaaataaatttcagctagattagatatttaattataaagaactaaattaaagtactagaaaacaataaagaatatgatattggggttgagaaagggattttattcgcttgataccaaaccataaaagaatgaaaaatgttatcttttggcccagcacagtggctaatgcctgtaatcccagtacattcagaggctaaggcaggaggatctcttgagcccaggagtttgagaccagcctaggcaatattggaagaccctgtctctacaacaagtaaaaaaaaaaaaaaattagcccagcgtggtggtgtgcacctgtagtctcagctacttaggaggctcagtgagccatgttcatgcctgagctgtgctcacgcctctgcactccagcctggctgataaagtgagtgagactttgtctcaagaaaaaaaaaaagctatcttttattaaaacttctgttttaaaaaattctctagaaattctaagcaaagttaagatgaacaayaagccaggaaaaatatttttggtatatatgacagagagatgatattcttaatatatataaagagcttgtataaattggaaaaaccaacacttaaatagaaaaattgataaaatgcaggaacatcttaatttcacagaaggaaaattataagtggttagtgtttatttacaaaaatattctcactgttttttaaagaaatacaaagtataaaagaatgatggtacgtaattgttattttattyttccatattggcagtacctttcatgctggcaaagagtttagaattataatgccctgtacatgcataagtaaaccattatttttatataatataagtgggttcctggaaggcaatataatagtgtgtattcaaaagtataaatatacatgccttttgatccatcagttttacttcctaaagaaatacagaacaagcatgcacagatatatgtacaggtgtgcacattgcattgtttataagaaaaaaatggaaacaataaaagattgagtaaataaataatggcatgtccatttgacagatactctgcagccattgaaatggctaaggtagatcttcatatactcctacatgaagatggaaagtatataaggatgatctttttcacttacatacacacagagacacactcaaatgcatatgtatacagataggtcaatcccacactttatttgtaggaagctcaaaatcaacagcagtaaacattaattggcagttagagtattcctggcgtattctgtgtcaggtctttgggatagaaagatgaatataggcctgtcctactctcatggtcgttataatctagcaaccttacgaggttgtaattggttacatttttttttgttctgtttttttttgagacggaggttctcgtcacccaggctggagtgcagtggcgcgatctcggctcactgcaacctccacctccgggttcaagcgattctcctgtctcagtttcctcagtagctgggattacaggccctgctaccacacccgactaattttgtctttttaatagaggcagggtttcaccatgttggtgaggctggtctcgaactcctgacctcaggctatcctcctgccttggcctccctaagtgcggggattacaggtgtgagccactgcgcccggcctaaattttttgaacattcaactatgtgcttggagctcacagtgttctaaagcgctttgcatgcatcatgttatttaatctactaggtatgtttgatagtatttccacattttacaggtaaggctaatgaggctcaacaagttaatgccttttttgagatcacactggtaaagtggggactgctcttgttccattttgcaggtgggaaaacaattttaagtgggttgatcactaacagagacaaagctttaactaaaggtttcctgtcttcaaagtttgtgctctcagtaacaatacttgatatctgaagcccctgattcacccacctgtttcatagactaaatattttttccttggctcttcttcctcacttattccctcacaatattttgtttgtttgtttcagacagggtctcgctctgtgtcccaggctggagtgcagtggcacaatcacggctcactgcaacctccacctcctgggctcaagtaagcctcccatctcatcctcccatgtggtggttgggactacaggtgcacaccaccatgcctggctaatttttatatttttgtaggagtgggtctcaccatgtttgcccaggctcgtcttgaactcctgggctcaagcgatcctcccacctcagactcccaaactgctggcatgagccaccacgtccagtcaacaagttttcttgactatagcaaactttaaggcaaaaaacctcttgttcatctaatttcacttttcagtagagaaagaactggatgatagagatggactgtctctctacaaacaaattttagaggattatgtataaatctttaaaagattattcatatttgaacagtaactcatatatgccttgagaccttgtaattggaaaattaagtcagaaatcttattgatgtaaatatgcatcagtactcattgtaaaggttataactaaacaatttacagaaactgaactaatggctaagctaactcaaatttataatttaaaagcagtaacacagtgggacaccatgtccaattcaagacagcactgatggcacactgataacagagtatattccagagaactgtagggaccctgtacacgcgtgggcatgagttagagctgctgtgcagtgcagttgaatattgcctggtgtgcagactgcttaatgaaatagtggtatagggctcagagtacactccagtaaagtgctatttttggttttacctatagcacatttttgtaactcagtaatttattttgtgggtttctagtaacttaagtaaggcctaattgtaaataaaagtgaaagtttgtggattccatgtcgtgtgtcacaaagaaagacttgcatttttggatcagtttataggccattgtaagaacccatcagtaggctgtggaccatactttgagaatcaccacttgttctgagagggtatgtgatggtgggaggaatgcagacaggtctcagttccctccctgctgctctctaytactttttccatccttgctgatgtcatgttctaaacttcatgttactgtaatctattctagactgctgacctttgtcagtggctttctccctctttgacctgatgaaagttcctcctgcttctaatgagctgytctttctgaagggattcccctagctgggcctctggtatcccagttctttatatcatagccttctcaggattcataagtgccctgggttaggagggctgcagctgggttgaaggatgctcaggcacaccctcctgctgkacctggaagggctgtactccctcccgcccagatcctgctcctgccttggtctactctcaggtaacttactgtctcctctctctccagtccagccaccttcacagaacgtcagttcattagagaaatctgtacgtatatgcaccaaaattatgggctagctttatttctcactgtaaaaaggagagggtcttgctctctcaggtattaagatattcttagagccatacaattaaaaatggtagtgttgtgctaagacagaaaaagtaaccaatttaaaaaataactcagagacaaaactcatgtataataggaattgtgtttgtttgctttttgagacggaatcttgctctgtcacccaggctggagtggtgcagtggcacagtcccrgctcactgcatcctctgcctcctaggttcaaggaattctcttgcctcagcctcccgagtagctgagattgcaggcaccaagcaccccatccggctaatttttgtattttagtagagacgaggtttcaccgcgttagccaggctggtctctaactcctgacctcaagcaatccacccacctcagcctcccaaagtgctgggattacaggcatgagccaccacgccagcatcatgtataataggaatttagtagaacgtaaagatggcaccacaagtcgaaggagaaagggcatacaggctcgttggatgaagctgaacaaaactgagtccatccctaactccaggtacaagtgtagaattcaggcagactaaagatttaaatgagactggtaaaattagaaagtaaccaagaaaacaaaagattatctctgtggcttggtgcagcagcacttcgggaagatgaggcaggaggatggcttggactttgataccagcctgagcagcatagtgagatcccacctctacacaaaattacaaaattagctgagtgtagtggtgtgttcctgtagtaccagctactcgggaagctgaggtggaagaattgcttgagtttgtgaggtcaaggctgcactccagcctaggtgatagagcaaaaccctgtctcaaaaaaaaaaacataataaaagattatctttgtgaattaggtatctaagggaaggactaaacaaaaccttaaaggcaaacattgtaggcaaaaagttgatgaacttgtttaaatctaatttaaggattttgtgctattaatgacatcatagacatggttaatacacagataatttactgggagaaaacattttcaatgtttaaaattctcaaggaatgtacagggaattcctgcaaatcaagaagaaaaagaacaaccccagtagaaaacaggcaaagaattagaacagacagtttacagaataagaaacccataatgctaagcatatgaagagatagtcaaactcatgggctataaaaatattcaaattaaaataagatgttttatatctcttagactgataagaaattagaaagctagataatgtcacgtgttggctggaatgtgagactattgtaacttatatcctttactggtagaaaagtacattggtacagccattctggagagcacgctagcaataattaatcaacttaagtatacacatatgctttagctcagcaagtcttttatttatattccacagaacttaccagaaacatgcattacttgtgaacccagtgagttagaggatgaatgtatttccttcctggggtgggggttcagtaggcaaaaagtagggtatttatatcatcaaatgatatgcagttgttagaaataacagaccaaatatacaaaaactatatggacgagacttagaaaacatagttggaatcaaaaaggaagcagaaacacagtttcacttaggtaaattagaaagatacagacaaaggtttttaaggatacaagaagcatgaaccataaaattaaaaattgataaactttaccaaaattaaaaatattggccaagcacattggctcctagtgctttggggggccaagttgggaggatcacttctaggagtttgagaccagcctgggcaacatagtgagacacccatctctacaaaaactgaaaataaaaaattagcctggcatggtggtacatgcctgttgtcctagctactcaggaggctgaggtgggaggatcacttgagcccaggattttgaggctgtagtgggctataattgcactattgtactctaacctggtagacagagtgagaaccagtctcaaaaaaaaaaaaaaaaaaagaagaagaagaaaagaaaaggaaaggaaaaataaaaggaacaaacttgatacatatgacataatagataaatatcaaactaacgctgaacaaaagaaatcctacatttaaaaaagtacatattgtatggcaccatgtatgtgaaatggaaactaaattagtaacttagatcagtatttatctggggtgaagagtgaagggagggagggattgcaaacggacacaaaaaatttttttgggatcagtggaaatgtcctttaccttgattgtgattttatgtatgtgtacaactttcaaaacttcaaatcatgtactttaaattgatgcagtttattatatgtaaattattcctttataaagttgataagaaaaagcacatgatataaaacataaatgtattaagagaacataaactrtatatgtattgtatacacacacacacacrmgcacgcacacattaaacaaaatagaacggttgcctttgcaggaggagagacatagtgaaaagggagaataaaagtgaagacttgatttatattatttccatagggttcattgcaactcacttgatatggttggataattgtttctgtatacctatacattccatgatggttagaaggatggcccatctaagcacaaggagtaaggccctctagggagcagaatggccaagatgttcactaaaacctacaaaagattactgtgggaaattaaagaatattgaaatcgacataccatgttcatgggtcagaagacctattaatgttactaaatctccycaatgtgttttattttattttttgagacagggtctcgctctgtcacccaggctgaagtgcagtggcgtgatctcagctcactgcaacctctgcctcccggttcaagtgattctcctggctcagcacccccaagtacctgggactacaggcacccaccaccacgcctagctaacttttatatttttagtagagatggggtttcaccatgttggccaggctggtctcaaactcctgacctcaagtaatccgcctacctcagcctctcaaagtgctgggattacaggcatgaagcaccgcacctggcccccaatgtgttttaaaatgcagcacattctctcartcaaaatcccagaaggcttgggtttttttgtctttaaaaaatttttgctttggtagaaattgaaaactgattttaaaacttatatagaaatatagagattcaagaatagtcaaaccattttgaaaaagaacaaagttggagggtttacattacctgctttcaaaacttatcataaagccagcagcaatcaagatagagtggtaytggtataaagatagatatatagatcaatgagacagaaaacagagcccagaaatagacccacacatatatggccgattgatttttcacaaaggggcccaggcaattcaaaggagaaagtatagtcttttcaataactggttgcacaaaaacaaacaaaagaacactgattcttatttctcaccatgtacaaaattaacttgaaatggatcatgcaacctaaacagaagagctaagactaaaaaacgcatagaacaaaatataggagagaaatgttagtgattttgagtttggtaaagatttcttaaatagggcagaaaagcataaaaaaaaacattgaacttyatcaaaagtaaaaacttttgctctttaaacaacactgttacaaatatttaaaggcaagccacagcctgggagaaaatattgtgaaacatctacaacaaaggtcttgtactttactgttgtactttactaagtcaataaaaagtcaaaacaaagtcaatacaagacaaaggtcttgtaccttactattcagtaataagtagacaaagagccagctaaaaataaacaaagatatgtatagacacttcaccaaagtagacatacacatggcaagtaagcacttgaaaagattctcagcatcaaattagtattaaatgcgaattaaaaccacaataagacactactcttatactatactatactccattggctgcataccacccccccccccaaaaaaaaggcagtatcatccaatcaatatttggcattataraaacagaagaatggaactatactaccagttagtaatttaaaaacaatttttttaagacatggtcttgttctgccacccaggctggagtgcagtggtgcaattatagttcactgcaacctcaaagtcctgggctcaggcaatcctcccacctcagtctccygggtagctaggactacagaagtgtgcctctatacctggctaatgtttttaaattttttgtagagacagggttttgctatattgcccaggctggtcttgaactcctggcctcaagtgattctccttccttgcctcccaaagtgttgggattacaggcatcagccaccgcacctaatcttaataataaaatttaaattgagagacagcattaagatttaaagtatttttcttatatcctttggtgggtcagttaagtatgttgataaacttagacttttttcagttaattatgtaggctaaagatttctaggtcaaccacaacaagaatagaaagtatgtaaagtgcataacttaaaaactaactagaagaggtcaggcatgatagttcacacctataattccagcactttgggaggctcaggcaggaggatcatttgaggctaggagttcgagaccagcctgggcaacatagcaagactctgtctttaccaaataataatggtaaataatttaaaaatcaggcaggcgtggtggcgtgtgcttgtagtcctagctactcaggaggaggctgaggtaagagaatcagttgagcctaggaattcaagattgcagtaagttatgatcatatcacagccctccagcgtgggcaacagagcgagactgtctcctaaaaaacaaacaaaagcgcgcgcacacacacacacacacacacacacacacacacacacacacagaaggggatatatagtgatgaaaaaaaggcatgaaactcaataaaagaaaaaactaggctgggcgtggtggctcacgcctgtaatcccagcactttgggaggccgaggcaggtggatcaggaggtcaggagatcgagaccatcctggccaacatggtgaaactccacctctactaaaaatacaaaaattagctgggcgtggtggcatgtgcctgtaatcccagctattcgggaggctaaggtgggagaatcgcttgaacctgggaggtggagrttgcagtgagctgagatcacgccactgcattccatcctgggtgacagagcgagactccatctcaaaaaaacaaacaaacaaaaaacaaatgttgagggaagagtccagcacttaatatctgaaacataaagctgagtgtattggtagtttaagcaagaagagctgtgcttataagacttagtctctctgagcaaagcagagaactactgtcttttgtagagtggttattaaagtttggtcaagtgtattttggttgcctgttgcactgtgttggcatctgcactgatgctacaaagcgatggcaggtaaagctgcttgccccttagcacaagtcaaatcagtagcactaaactgctattatagttgtcattatatttctcactgccacacgtggtaggaaataaaatgaagccaattttacttaaaaatgttattgacgaaacatttaatttcatgaaatctcaatttttggatatgcgtygtttcactcaaaaacgaatgtctactcaggaggttgagacagaaggatcacttgaggccagcctgagcaacatagtgagaacccatctcaaaaaaaatgtggtgatgaaatgggaaaaatacgcataaaacactaccactgcacactgaagctttattkttgccccaaggaaaagccctcatggtatggattgtttgtactacaagctgaactagctgctcttttgggggtaccatttttacttgaaagaaatgatagacaaagtatggttatttagactgggttttgacagaccttttctcaaagatgaatgaagtaagcctgtcacttcaagggaaaccactggcagtatttttttgcagtgagaaaactctggctttcaagtgaagactagaattctgaaaaacttacatctgctgccataagcctgacatctcaatatttaaacacttgtctgatacagtcagtagakatattaacaaatgagattttttgatattttataacgaatgtgaaatcattggaagatgtgtataactcagtgaacccataatgcgcaaatgactactgttaggatgttacagaatcatgcatggataaaagatctattcaggccaggcgcagtggctcacgcctgtaatcccagcactttgggaggccaaggcaggtggatcacgaagtcaggagatcgggaccatcccggctaacacggtgaaaccccgtctctactaaaaaatacaaaaaattagccgggcgtggtggtaggcacctgtagtcccagctactcgggaggctgaggcaggagaatcgcttgaactcgggaggtggaggttgcagtgacctgagatcataccactgcattccagcttgggtgacacagcaaggctccgtctcaaaaaaaaaaaatgttgatagcactattatttcttgtagccaaaaagtggaaacaactcaaatacacaacagctgaagaagggataaataaaaaaataaaatgtggtatatccaaacgatggactgttctgcaataaagaggaatgagatactgataatgctacaatatggatgagccttgaaaacattatgctgagagaaagaagcaggccacaaaggccacatatttaatggtttcactgacatgtccaaaacaggcaaatctatagagtcagaaagtagattagtggttggaggggataggaggatgatatctaagggaaatagggtgattcttccttaaccattatctgccaaggccacactaggctgagcagtggaagaatgtccctccgggagctggacagcttcagcagttcatttcctgttgttgggggttttgggagcctgggaattcttgtaagatttaatagtcacaagccattgcaggctgggcttggagtttatttggctatatatttccttcaaaatttaagtagctaactgtaaaaagatttttttttttttagataattgtggaaatatgaatgtagtttgagcatttgatgaaattaagaaatttaccttgtgttaatgatattgtggtcgtgtaaagaaatgtctttgtgttttataatgtccagaaggatgtatttagatatgaaatgacatggtgtcagggacttgttttataataatgcagccaaaaaagagagaaggagaaagaaaagggggcaagggaaggaaggaaaaaacaaaggaagaaaggaagtcagaagtaaaatgttttaattgttgaatctgtaggatggggttcattatactattctctctacttgtggttaaaaactttcattaaaaaaaagtcaggctgggccgggcgcggtggctcatgcctgtaatcccagcactttgggaggccaaggtgggcggatcacgaggtcaggagatcgagaccatcctggctaacacagtgaaacccagtctctactaaaaatacaaaaaaattagccgggcatggtggtgggcgcctgtagtcccagctactcgggaggctggggcaggagaatagcgtgaacccaggaggcggagcttgcagtgagccaagatggcgccactgcactccagcctgggcaacagagcgacactctgtctcaaaaaaaaaaaaaaaaaaaaaaaaaaaaattcaggctgggcttggtggctcatacctgcaatcccagcactttgggaggccaaggcaggaggttcacttgagcccagmagtttgagaccagactggggaacatagtgagacctcgtctctaccgaaaataaaaatgaaaaatcagtcggatgtggtggcacgtgcctatagtcccagccacttgggaggctaaggcaggaggatcgcttgaacccaggagattgaggctccagtgagccactgtactccagccttagcaacagagcaagaccctgtctcattaaaaaaaaaaaaaaaagaaagaaaaaccaaaaagtcaaaccaaacctttacacaggtatgtaaccatatctgtgaaggtatcagagacttatttagtctctgatgttttacttattggcctttgtgctctatccttccctctagcccttaaattaatgcatggctacttggcgagtagtccagggtgggagacaatacttttaatcttcccctttgagttcactccagttgcctggcaaagaattcaactataggttgaaaagtgttgggggccacagttttatctcctgtgaaggttgttgcttggcggcatccccttaaaactgcttccattgaggatataaacgctaccatttataacaagaggacggggaagttgtctgtgtgtatctccatagttatacatacataagcatatatattatatataggtttgcatacatatgcataaaataactggaagcataaaacccagaaataataactttggtttctttctgggaagaaaactgatagctggaagataagagtgggtgagactgctggggagagaggagataggatgaaaggggaccaaaaaccaagtcctggggaaatgataaccaaggaggggtaagcaggaggaagggcacaatgggaagaagcctgagaaggagcagccagacagataggagggaaaaccaacagaagaaaaagtttcaagaagtcgtgcaaaggcatgtatgtgcccttgcccttggacccagcatttccacttctaggaattcccctactgggattcttgcacacttgcaaaatgatatatgcacaaggttacccatcgcagcactttgtttatttgcagcattgtttttaatagcaaaaatttggaagcaattagaatgtttaccagtagagaacaagttaattaaatcatggttcccccatccggtgagtactctgcacctgaagatgaggaggctctgtatacactaatatgaaaagatttctgaaatatactgttaggtgtaaaaaagcaaggatggggagttttctttggggcttataatgttttaaacttttatcattgttgtaaatggatgtagctggttgttatattccttacaattacgagatactgggttcttgggtttgtttttctatgagttctagtattctgttattctttctaactttcttattatgagcaatagttggcatggaggagtggcggatcaaatttttaggttattaaataggctccatttcaagccaatcagcgttgccttctgctgttttgtgcctggctgccaagtgcctttatatggtgtttcagctttttaatggagctttgatatgtagcagtcaccctgagccacaagagggcagaagaaccttttgattgccacaggacagattagcgctggaatgacttctggcaaaatcctgcatggagtagttcttcaactcacttactagaccgtgggcatccaaaggcaggccagtgtctaagccatcagaggaggcaatggaggggtgagaggagagagtgtgtgttttggaatcctctatatctgccttatgttccaggctcccctgcaaattacttagtgaactatactccttacagtgttaacctctctcagagcttgaatatgcaagacagtagaggcattacaacatartggaacataagagttgaggctttggaatccaccccacctaacgttgagtcctggctatgtgactttgggtcatttcttaactgtcatttattcaatgagatagtgtgtgtagagctcttagcactgtgttgtgaacactcagaaagtaactgctataattacaatagtacaaggtatcagcacagatgaataatattaatagatccttaataacttttatgtagctctgttatgtatttaataatttatttggttataagcaaggaggtaatattttccttaagacaatttcagagctccttttctcagaggggccctcaaaatgtctgtggtatttcttactttcttataaacagtcttttaatagtatagtacattctgaatttttgcagagtctcaattttaaaggttccatcccactgtgattttgtgtatttttgattggaaaatatagtatttgggctatataatgaggtagagtcgcgcaacacaatattgcatcgggatatagtacctgtctcaggccgagatccaggggaagcaaactctgagataaagattagggtgtgaaaagcttattagggagtggttatggaatcaatactcctggaaggaaaagaaaggaaatgaggaagaagggaaaagaaaagggaaagatgtggagattgtatagggggaaaaatcgggccgtgattcagtctcagtaaaaggcctcagcccaccccatggggactagggctcagataatccatgttttctaagccatagagtgagagagctgtgcctttacagctcctcctgacccgtcattggacgagggctgccccaggaaggggcatggccgtgggccaggcagcgctcttcagcagatgcattccctgaagagggctgacagttgaggcctttctgtccttcaccatcccagcagctggggaataagccctttagttactgagtggcctctacagcttccaccatagtgcccaaagggctctcctgaaagggctggtagagtaatagaagacagctttagacagaattgctttgaagcaatacttaagaatacttgttatttttaactttaagaataaaaataaaaataatttcatttttcatttatcattttagtgtcagggtgaactctagtgtaaccaactacccccaaatttcagtggttttaacacaataaaggttatttctctcctgtcacaatctggtgcagttctatattggtggggaggaattctgctctacctaattcatttagggccacagacttcatctagtractcccccaggccctagggcctggagtccttcactggattctctaaaccagctcccagaggagaaatggacaggaacatggagaactgtgcaggtctcagtgaagagacctctctcttcaagcttctctcttcaagcacagagaagttcatgtgcttccctgcagcgcacgttccacagatcagtactcagtcgtgtggtcccacctaactgagaggaggccacgtagccctcacagctacactgtgatgttgctcatacctgtgtggtggctccatttcatcactattggtgaatcaaagacacttctaaaactgtatgttttaggttccccacacttaaaatacttaaattgccaccatcatagtatcatagttttacttacctggggacattttaaaaggctgaggaaagctaaactttatcagagagaaggaaaagaagggaggaatacagagctgagaatttaaggattccttgctctggaaaggcaaaaaagggtaaaacaatttcatgtgcatgtgtgtgtctgtgtgtgtctgtgtgtgtgtgtgtgtgtgtgtgtgtgtgyycgcgcgcgcgcgcgtccgcgcgtccgcgtgcgctttttttttagtggtataggagaagattgagaagcttctgatcctgccatgtagctgtaaaaacaagctcctctttccctcagccataacaggattgatgtctttcacatggtaacaatggagatagatgtgtgctgcagggaagcacatgagcttctctgtgcttgaagaaagaagcttgaagagacaggtctcttcactgagaccagcaccattattcatgttcctatttctcctctaagagctggaataaaaaatccagtggaggaaattacaaggaaatagtcattcaaatagccctgacagctccttgccmggattcacatgaataccacccaagtagcccttaagtcagaggaagagaggccaagggagagatatcaatgacttcttctgtcagtctatgaggattactgctgactgacagcttgttacttactcagctttattccaggcagtgtggggcatttaggaagagaggtgcctgggcctgggaattttaaagactgaaagctgagactcacaggaagtaaccaaggacaagacaatgagatgaagtgtttcagagacaacaaagaagtggcgatttaaaaaaaaataagtaaataaataagaagtgatgtcaaggaaagctttgaggaagagatgggcactgaagcagggacctggcggttggggtaggacatgtggggacctgggaaagtgctctagcagacagagtactcgaaatattttgtaagcttcagtgagagctgagagcggcttgtgaggaatggtggggggcggggagtagtgagaccgaggattgcagagcagggcagagtcgatgacagaaggccctaaggtgaggtgtggagtttagatttaatgcagcagggccattaaaggcttctacccttaatggaaagacctggtggaaaagtagtgttctggacttttgtgtgaaggaaaattaacaacacagaggtctcttctggaatttctgttgagcacctagaatttaaaatgggaggttgtgttcctttattccctcagcaaaataagaggaagtgactctcaagcctggacttgaaagatgaatgaataagatgagaagtgcattctaggcagtgatagtagcatgaataaagtggaggggcctggaaaagggctgggagagtcttgtgtggaatgcagagtttggattctgagttaggcggaagcagctgatgaaaaggagagagagaaatgtggtcggatttgcattttagaaggctcactttggcagctgtgtggaggctagattgcgagagaaagaaaagaggtagggataccaatagccacagcacttcaccacttgaggagtttcagggacggacagatgcttggaaaggccttgtggtggaggtaacatctgagctgagtagggagggctaggaggagcagaaaggcagagggaagattatggatagaggcgcaagagtgcaaggcatggcatgagtgaaaaccaggggaagatggatgtggctggcatatagagtctctgggggatggtactccctgggcaggtaggtaatgagtcaggtcacaaaggtccttctttatatgtcacagtgaacagggaacagtttagacttcatcaggtaaatgaaggggaagccacagaccatacctaaagcaagtctcaacaagtgtcagaggattgatcacatgcagaatcaatcctctgaccacagtgaaattaagctagaaatgaataacaaaaagataactagaatattaagaaatgaatttgtaaataatcattgggtcaaagaaaaaatcatgggaagtagaaaatattttgaattgcatgatactgaaaatatcaaaacttgggtgggggggtaggggaaggatagcattaggagaaatacctaatgtagatgatgggttgatgggtgcagcaaaccgccatggcacgtgtttacccatgtaacaaacctgcacgttctgcacatgtatcccagaacttaaagtataattaaaaaaaaaaaaagaaaatatcaaaacttgtcaaaayttgtatgatgctactataacctataagcatagagggaagtttgtagactttaatgcatgttagaaaaataaccgaaggttgaaaaaaattagtaatctaaacatcaatttcaagaagttagaaaatgtagagcacattaaacccaaagaaggaaaacagaaaataatagtttgatgaaaaagaaaaaaaaatacagaggatcaacaaagtcaaaaatttgttctttcaaaagattaacatacttttccaaggagcaagtttttttaaaaaaagattaataaaattgacaaatgctgggcacagtggctcatgcctataatcccagcactttgagaggccagtatttgaggatcacttgaggccaggagtttgagaccagcctggacaacacagcaagagcctgtctctacaaaaaaattttttttaaaattagctgggtgtggtggtacatgcctgcagtcctagctactccaggtggctgaagcaggagactcacttgagcccaggtgttcaaggctgcagtcagatatgatcacactactgyactccagtctgggcaacagagcaagaccccatctctaaaaataaaaaataaatttttcaaaattaaaattgacagacttctggcaagactgattgtggaggtcagggaggagagaaattgaagcacaagtgccagtgaacaatgccaggaacaggaagggagaccacactacaggagctataggcttgaaaaagataaaaagaggctgtatgaacaattttatgccaaaagtcctgagaattttgtgaaaatagatccatttctagaataatatccgactaaaactgactcaagacatcatggaaaaccttagaatcctataaactttttaaaccaatggaatcaataatccaaaatctttctccccagagaacttcaaacccagagggcttcactggagatttcttcagcagattgaaaagaataattaattccagctttgttcaaacagttccagagaactgaaaaagagggacactccttactcatttttttgagactagcataaccttgataccaaaactgaagaaagacaaactcaagaaaggaagattaaaggccaagctacctaaaaatataaatgtaaaaatcctcaacagacatttagcaaattccacaatatataaaaaagataatagatcaccatctagtagttgggcttatcctaatatacatggttgatgtaacgttagagaaattcatcagtgtaattaatcacattcataggttaaatagatttttattagattaaaaagaaaaacatttcagtagatacagaacaagcatttaataaaattcagcatgtgttgatgctggaactgcttagcagactaggactagcagagagctttcatctgaaaaagggtatctgttcgtaaaactcaagcaaatattttaagggtgaaattttgaaagttttcccttcaagatcaggaacaagacaagaacattcccaaaccactttttttctaatattgagctgaatgcctagcctggtgcactgaggcaagaaaaacccatgatgaaaatcttaaccgaggaagtagcaggatggggaggggagggcatgggcttgggagacatttgggaagaagccttgtcatgccttgggttcctgtgttcgtttctttttttcaacacatattgactaaatataatatctggtaatagggaaggtaggaaagagaagcaaaggaaaggggcctaacatttattcagttcctaccccgtgaaggtgctggactagatggttcaagtgttttagcttatttcattcacatactctctttgctatcttgagaactcctgtaattagtcatccgggaaactacataagaaaaaggtaatatactatatatttgcataaaatcattcccattgtaaaatagtagttcaagcttgtttttaggtataaaaggatgttgtattttatgtactagttctgtttttattttttctctcatttttattcatataacaggtctttgaagtagaataaagtctggcaaatggtctttttctaattttatagataaagaagcgagtacagaattacactgattagctcaattgtcaatatgggactgaaacttcaatctttcatcccagggagtaaataatttaaactataacttgaaccatggagtaaataatttaaactgtaacttgaaagcacataatcaaaagatttttgaaatggaaatatgctggggtcctggaagcatggttcaaggaatcaagcagaatattctctagtaaaagtctttgtaagactaactatgaaagagagaggagacagagagaagtgaggagaggagaggggaggggaggagaggagaggggaggggaggagaggagaggggaggggaggagaggggaatgagtaggggaaggagtagaagggagaagaccagtggacgggcctcaagtttttagctgtgtgcgtaaattaacaaacacaaacagaacagattttaaaagcactgacataggagggaaggaagggtcaacctcattatgacttgttgagatgggactrgtgacaaaaacaggatgataaaaagataggacatttcaaagactacatttaaaggagaaaaagaagcaagctgtcctggaggcaagactaggggtgaaaattgcttggacagttgttgttttttttcttttttttgagatggagtctcagtatattgcccagattagtcttgaactcctgggctcaagcgttccttcagcctcagcctccccaagtagctgagagtactacagatgcacatgagacttggatagttgttgattgactgttaactctagaaacaaagcatctaataaaatcttgccttgcttcttattgcttggaagggagaagttattcaatttagcaaacatttctgaattcctgctgcatgccaggtactttgccaagtacccaggatattatgtctggtgaagttcaatctctgagccagaagaaagttctgagccctgatctctatcagataatccagaacrtcctctcatggcctacaaggcccttcatattctgatctctgactgtctttacagctttatcttccaaagtaacaaagatagctatcattgattgagtttaagtgctttgcatgccttaccttccttaatcagatcttcactcttccagctgtagttgccatttccagtggaattcttttgtccctcatcagttatccccttcttttgaacattttcatcctctattttgtcatggctgtttccctttgggcaataaacatgcttattgacatgtaaatgaaaactgaatgtattttatattcaaattgagtgtctgaatatatctgttataaatagaatggctggcttagaaaacatgaattagagatttattttccaggtactataaaagtgattcttggaaatcattatatttaaataagcgagactgttgggcgactttttgttttttttttttggagacagagtctcgctgtcgcccaggctggagtgcagtggcgtgatctcggctcaccgcaggctccgcccctggggttcacaccattctcctgcctcagcctccggaatagctgggactacaggcgcctgccaccacgcctggctaattttttgtatttttagtagagacgggatttcaacgtgttagccaggatggtctcgatctcctgaccttgtgatctgcccgcctcggcctcccaaagtactgggattacaggcgtgagccaccgcgcccggctgggtgacttcttttggaaaccacttttgacccctaatttagtccagaactcagattataatgttttaataaagttgtgtgtgtgtgtgtgtgtgtgtgtgtgtgtgtgtgtgtgtatagtatctgcactatccagatcatggttgttatagttgtgatgcttatagtgttaatttgaggaaaataactttcttagacaaatgaacacctccctttgtttttttacagaagatggcctgtttcaaaggtgtgtgcccctggatgttggggtcaccatttttctctctttcaggagcatggaagttaaaaggaaaaataagggggaatatgagaagtcaactgacttgaaactgagcgtatcctgcagaggtggtctttttttttttttttttagatggagtttcactcttgttgcctaggcacaagtttcactcttgttgctggagtgtgatggcataatctctgctcaccgcaacctccgcctcccgggttcaagcgattctcctgcctcagcctccccagtagctgggattacaggcatgcaccaccacacctggctaattttgatttttagtagagatggggtttctccatgttggtcaggctggtcttgaattcctgacctgaggtgatccgcccgcctcagcctcccaaagtgctgggattacaggcatgagccactgcgtctggccagtgatcctttttttaatcctatatgtatatttgctttttgtcatgatggacagatttcctggaatctagagcgcttgtgacagactcaggcttccatcatgagctcattgcttacgtcttattctctccagctacacgcttggtgccctttcctattgcagtgattttttttggtttgtttgtttttgtttttgagacaggttctcactctgtcatccaggctggagtgcagtggtgtgatcatagctcactgcagcctcaaactcctggctcaagcgatcccatggccccagtgtcccttgcagtgattttttttttagagaaagttttaaaatttgtattcagtagagttgtttaataaaatgatgaaatactttttcttggcagatactgactttattttatttttcgttttttgaggaagagtctcactctgtcaccaggctggagtgcagtggcgtgatctcggctcactgcaacctctgcctcccaggttcaagcgattctcctgcctcggcctcccgagtagctgagattacaggcacgtgccaccaggcccagctgatttttttgtatttttagtagagatgggatttcaccatgttggccaggatggtctcgatctcttgaccttgtgatctgcccgccttggcctcccaaagtgctgggattctaggcgtgagccacctcgccaggcctattctcaaatttttttaaaaaaatcactctatttatgaatttcctagttagttttgaatgctctgataagtgagaaagtggaagtgagaaaggaagatgtgagggttattgagtgttgtaactgtagttaattaatgccttctgagatagctggatctggggagccacatccacctcactccagcgggcgtgattttggctcctgattgacatcctacctgtgatttttttgtttttgttttctaaagaccagaaggatactaactcatgccttccttggcatctcagtgttgtcttactgagcttactacatgctctggtcccagggctccaagttctgacccactgttaatcctttttatttatttgtttcctcttagcattttgctttggagaaattacaagccattggaaaagttgaaagaacaagctgatgatcatcaagatcctgttaactagattccccagtttacattttaacattttccacatttgtcctatctttgtagatggatagatagatagatgatagacagataggtagatagataatagacatttttctgtacaatttgaaagtaaggtgcagagtttttgatatttcctcaaatatctcagtttgcacctcctgaaaaaacaaagtttttctccttcatagccatggtaccattatcacactaagacaatggacttaattcttacattaattatttaataattaacttactaatcacaagggcaaaactgttctgtggttcaacaccttaaccaaatgatccaatttaatatcaccagtagtgggacagtctgtcattatgtgccttctgatgtgatgcagtaagaaatacatatcacctacatagtgtctgtgccaaggtgtttaacctgaatttgatcatttaaaaaaatcagatgaattcaatacacaggacatgctacaagccagctggcctgaactcttcaaaagaaggcagtcacatgagaaaacaaaaatggagagggtgagctgtttctaattataagaggcaaaaaagacagaatagccaaatgcaatgagtaaaatttattcaaacacagatatataagggaaaaagacatacttgggggggcaattgggtacattttaatatagactataatgacaatattgactccttgttattcttatatataataaatccctgttagtagtagttttggattccagttctaacttggttttttcttttgctattgttactcttgtttcactgagcacatggaactatatatcttatattttaatttaaaaaggaagtattttctgtcttattgccttgtggaaggttttgtaatgatttgtttccagaaggctgccaccttgctgcctttcaggtgttgagtggatcactgagggagctccactctctgggatcttcaggacttttgcattgctgatcgtggactggagtttttaggataggggcccagcaaaagaatgagaggagtcaaggccaagcgtgggcaagccccatatgaagaaatagatgactcacctctgtggaaggtggagccaagcatctccagggctgtagatgtcctaaaatacagatttgtaaaagtctgttgtagttctgtgtagaatttggtcatcctttcatttggaaaagtgagtggtaggatttttgtttcctaaagatgacctgtttccagatcctgttttatagcatttttcgttcattcattaatttctcactcagcaaatacatattgagtgtctgctgtgtgtcaggtactgtgccaagtgaaagggattatggaaaagacattatgtgwcacctcaagttttcaatctagacagggaaaccaacattaaacacaggtaaaccttcagttacatccgcggtaagtaaaagcagggagcgtgagaataccagaaagatgccagtctgagatgctatctcagagtctagctctgaagatgcttacgccacacctccgtcctcagcccctagttacttccagtccctgactccctgattctggcgcgttctctttcctagtgtaagagcgagaaccagctaacttaatccatgagtaccttgtatatcaatttataaagataatttgttacctttgctgaataaaagaagctcttcctgattgccagaacctccctatttttcaagagaagctggaaatctgaattttttttttttttttcgagactgagtcgcgctcttgtcacccaggctggagtggaatggtatgatctcagctcactgcaacctctgcctcccagattcaagcgattctcctgcctcagcctccagaatagctgggattacaggcgcccaccacaatgcctggctaatgtttgtatttttagtagagatggagtttcgccatgttggccaggctggtcttgaactcctgacctcaggtgaacacctgcctcagcctcccaaagtgctgggattacaggtgtgagccaccgcactcagccggaaatctgaatttttatgtgaaatctcctgacttataaatgttaacaaattcagacatttgcaaacacttcgtgggctaaacctaatacatctgtgagcctccagtttacaacttctacttggggggacacaaaaatatagttatgcaggaattctaattcaaagattaaggaagttccctttttcttgtgcatacccttgttcagcatagttaccaaataaaagattcagaataccaaggacacaaaccaggagtttttttttttaagtcccttttattttctcctcaatataatattaagtaataaataattatgactttcactgatcttccttccttaacctaagcagtaaagatctccctatcttgcaagaggcaggtgaaggagatttgtccacagtcagcctccattgaccacagtatggtcagtgtttccctggaggtgaggtgacctgccttctattcctttttcttcctttcttgtagataatagttttcttgaaatataatttacacaccatacaatttacttacttaaagttcaaaattcagtggtttttagtatatccacagagccgtgctaacagcaccacaattacaaacatcaccacaattcattttaaacattttcattaccccaaaaagaaatcctgcagccatttgcyrtcagggcccattttccctcagtcacccgtatccctagggcaaccactgatctgctttctgtcaccgtagatttgcatgtcctggacattccatataaatagaaccatataatatgtagtcttttgtgactggctatatgggtttttgcacttaggataatgtttcaaggtttgcccatattataacatttatctcatttcttattatggccaaataatattccattataggataacaccacattttatttatccattcatcagttgatgaatggataaatatggatgatatttaggttactttcactttaaactcttattatcaataatactgaacatttgtgtacaagtttttgtgtagacatactgttttcatttctcttgggtactggcagtggaattgctgagtcacatggtaactctatacttaacttactgaggaactgccagactgctttccaaagctgctacatcattttacattcccaccagcagtgtgtgagggttcccttcctccctgtgccctccattcttaatacttataatgatcaacagtgatgacaacccattacaacttcacatttctcagttggggcgctgaaagctatgtgtcctctcttttttaatggaaatattataaattgctaggcgtacaaaatttctcatgagaaagtataaagactttgttgagcacctttcatttttgccccttctctggcttaactaagtaatctcttgagaatggtatggtaccatgctcttttaaggacagcctatcaagttcatctttttcccaggtgaaaggaggaatgtcatatggctaatgacttcagagtctcatcatgtctaagggtctctggcacatgtatattatataggtcctgctatcagagagattcatatcttttttattatttgggtttttaaagcaaatcccagacatcatgtcattttacccatgaatacttaattacacatctctaagtcatacgatcttttttaaaaaagccaatgtgttattacctcacattaacaataattccttagtgtcttccaatacacaatccatattcagataaccccaattattaaaaatgcctttttgagctcatatagccaagacaatcctaagcaaaaagaacaaagctggaggcatcatactacccaacttcaaactayacttcaaggctacggtaaccaaaacagcttggtactggtacaaaaacagacacatagaccaatggaacacaataaagaactcagaaataagaccacacacctacaaccatctgatcttctacaaacctgacaaaacaagcaatggggaatgatgctgggagaactggctagccatatgcagaaaattgaaactggaccccttccttacacattatacaaaaattaactcaagayggattaaagacttaaatgcaaaacccaaaactataaaaatgctagaagaaaatctaggcaataccattcaggacataggcacaggaaaagatttcgggatgaaaatgccaaaagcaattgcaacaaaagcaaaaattgacaaatgggatctaattaaactaaagaatttttgcacaacaaaataaactatcatcagagtgaatagataaactacagaatgggagaaattagttcaaccattgtggaagacagtgtggcaattccttaaagatctagaagcagaaataccatttgacccagcaatcccattactaggtatatactcaaaaaatataaatcattctattatagagatacatgcactcatacgttcactgcaacactgttcacaagagcaaagacatagaatcaacccagatgccaatcaatgatagactggataaagaaaatgtggtacatatacaccatggaatactatgcagccataaaaaggaatgagatcatgtcctctgcagggacatggttggagctggaagccattatcctcagaaagctgatacaggaacagaaaaccaaaaaccgyatgttctcatttacaagtgggagctgaaccatgagaacacatggacacatggtgagaacaacacatactggggcctggtgcggggaaggagagcatcaggaagaatagctaatggatgctgggcttaatacctaggtgatgggttgatctgtgcagcaagtcaccatggcacacatttacctctttaacaaacctgcacaacctgcagatgtaccccagaacttaaaagctgatgggaaaaataaaaagccttttcatagcactttggatctgggtccaaacaaggtccacacatttggggtttttttaaacttatytttcattctagattaattcttttcaatcatatttagacaaagaaaacaattacaaaataatatgagtatttagtaagatattcaataggatatgatcaaatgtgaggcatccagatttcttttctttttttcttttttttttttttttttttgagacrgagtctcgctctgtcgcccaggctggagtgcagtggcacgatctcggctcactgcaagctccgcctcccgggttcacgccattctcctgcctcagcctcccgagtagctgggactacaggcacccgccacaacgcccggctaattttttttgtatttttagtagaggcagggtttcaccatgttagccaggatggtctcgacctcctaacctcgtgatccacccgcctcgtcctcccaaagcgctgggattacaggcgtgagccactgcgcccggccattctttttttttcagacagagttttgctcttgtcatccaggctggagtrcaatggcgtgatctcggctcactgcaacctccacctcccagttcaagtgattctccttcctcaacctcccgagtagatgggattacaggcacctgccagcaggcccagctaatttttgtatatttggtagagattgggttttgccatgtttgccaggctagtctcaaactcctgacctcaggtgatccacccgcctcagcctcccaaagtgctgggattacaggtgtgagccactgcgcccagctagatttctaacagactcttcattggccctattggtaggtatatgatatgctgtaataattaaggaaccagatcaactagatttgaagccccagtcctatccttataggctgtgtaatcttgtgcaagttactttagtgtttgttcgtattgaagttatacatgtgcatagtttacagggcttgttcccaacaacaaaaaaagcacttcctcattatcaccactagttgacttcctacctccaagaggcattcatttttaactcttttaggtaacttgtttggttttttaacctctgaatctctaataacaagtgtatgttgccagttcttgatttttctgttttgagtattacctactgactttcttcaatggaagatgaatatttaatactctgtcacactcaccactcctctaccacagccatgcaatctatcctccaattcttctaatacggttagagcaatattcagtctatatactatgaccatagaaacactattcatagataccatgattactggtttttcattgtatgttttgtttttcctgaagtcagtaaaagtcttgctttttgctttccttagttttctatgtatttgtcactaattcaaccctaaactcttccccagttgtataaatctttctccatatgttcagacatgttagattgtctatcagcttcattttcttgaagaactctctttgggagcctctgacatgctctctttggatggtttgctctctgtgtagctgcacrtctgtggtcttgaagtccctgtcaccatcctcttgtggtatatctcatttcctgggccccatatttttttacttcttcatttaatggaacacatcttgtactgattycctgagaaaggatacatgagaggtaattttttgagaacatacctgaaaatgtctttattctgatttcacacttaattgatagtcttgctgcgtatagaattctaggttggaaaccattttccctcagtattttgaagatactgcccccattgtattctaggmttttggtgttcctcttgaggagtcttaatgctattctgatttttaattatttatataaaacctgtttgtagttgttctctctggaaatttgaaatttcatgataatataccttgatggagggctgttttcatactgtgctggacactcagagggcccttttaagctcaaaaaaactcaaaacctttagttctgggacaactttattgagttattcttttcagcattttctccttttcattttttcctgtattctttctttctagaactcccatattcagaaggcatgttttctggacttgtcctttaatcttttaaaaatattttaatcattttccatctctatctttttgttctatattgtgagaaatttccttaacttttccaatcccttttccaggtcctttttatttctgctattatgtgtttcattttccagggttacttttttctttttgttcacctcaccaaatatattttttatgatatcctccacctgtttcacgaataacatttcttctctctgaggagtttaatgattttttttttcctgagttttcatccccctgagtctcttcagtttttccatgttgcatttaggtttcatttgttttggtctcctgtcgttatagcaaatactttcctctaatgcctcaaacaatcttggctgtctgctcatatttagaaaccgggaatcttgtttttagtatcatcttcattccctcttctagtggtacctgatgctgccagtgattgagtctttggggagttctgtgatgtatttcacgttcagttcaacttttcccactaccagcacaggattcagctttcttgagtttgctgacttccacttgtctacttggtttccagttttgtgtctcttctgtctttgtcctgggtgcttctgctttacaatgaacatgcagtcgtttctgtcacttggggagatttgaatgggagtaatctaaatcaggtcagcaaactgtggttcctatgccagatctagcccacagcttgtttttgtgtgacctgacttaaaaatgatttttatatttttaggccaggcacagtggctcatgcctgtaatcccggcattttaggagactttgggaggcagcggatcatttgagtccaggaatttgaaaccagcctgggcaacatggtgaaacccccactctactaaaaacacaaaaaattagccaggcatggtggcacacacctctaatcccagctacttgggaggctgaggcattagaatcacttgaacccaggaggcagaggttgcagtgagctgagatcacgacactgcactccagcctgggtggcagagcaagactgtctcaaaaaaaaaaaaaagatttttacatgtttaaagggttgctaagcaaaacaaaacaaaaaaacagaaggatatgtgacagagactgtggcctacaacgcytaaaatatttactgtccacytacagagaaagtttttcaacccccaactgaaatctcctatttcaaactggaaggctagttccttccctcccaatttccacatgcaatgatcacctcccatttcatagagaaaataaatctattgggcaatctacttcttactctcccatccctataccaaaccactgcggtttgccagttacccataatacttcattaagtcaaactgcaatgaatttgaaaggtcattgaaaacctccttgttactgaattcagctccctattttttcagtctgtattttactggctgctctatgacatttgataacgtgtggcttccattctcacggagttaactgaacctgctctttctgaaatcgccagtagcatcctaattggcaaacccaaagaatgctttccacaccttatcttctcctttcttttgctacatttaacattattgcttcccatctatttctggaatatttctactcccttgtattctgtggtagtattttctcttagtcctcaccatcccacatccgatcagtttcccaatcctgtccattctccctttgaatttcatccggcccccaacagcctcacgtgagaccctcattgtctgtcacctggcttaccacaaagctctcctgctaggtcttagcctccttacgctctgtcttacacactgccgctagaatggttttcctgaagcaaaaatctgttgatatcattaattttctgaaaaatatatagtgtctttctctactctgtctacttttactcaataaaatccagactcctaacttggtattcaaaaccccatctggtctgcttttctgccttattttcactgtttctccctctctatattcctctccacttatcagtccctcttttacttcagccacactgtcatcaacggtgatgatgctgatgataaaaacactaacagcagcatgtattgaggacttaactacatgccaggcactgtgttcagtgctttatgttaatttggacatctaatcctcatgacatggccttatgaggtgggttctattaatggtccaccagtatggcaaatatgaacttgaaacatctttaaacatttttttttcaaaagatcagtgtcaaaattcgtttggcagtaaaatctgacctgaaatggtatgaatgtatttatagtcccttttagcataaaaattcatttcatagaagaaatattaatatttaattacaggatgctgccccaaacctcatagggggatgttaaataatatatggtttgtgcagtatgctgctttcctaaaatctgaacactttgggattctaatactatctagtttgagggggctcagataagaaattttgaactttrtgttactctttttacagatgaggaaattaaggctcagcaagatttaagtaggttgcccaaagttacatagtgggaaaaacagtggagcccggattagcaccatggtggcctggttcaaacgcatgccttgtctgctgtgctgcacaggtccatgccacctgcaggtccctgccctcgacctcttctgggttgctggctttctgccctccctgttctcccagtgctcagccctggctgacttcccttccattcctattcacccaggctggctcctttcagtagcagcctccatgcctttacccccttgtcctcctgaaaatgtcccactgataccaagctctgaccaagtctgcccatcttgtctctgattgggctgtctttcatttgagactcgatagaaaggtgaatcacactcatctcccagtttcagactgtgccctattcagtacttggcaatattgccttttccatttcctttatcagcttcctttcctgtttctagagcagctgtactaaaacttttcccatcccctgagctccaaaccttatataccatcttactctcagtttcagcagcacatgcctagttccrtattcattccacctgcttgagtcgtacacacaggggtttgtaagcagtgccacccttacactgcccccaccccccgcagtcttagagggcagcagctggtagaattccagctactcccagacttcctgatgtccctgtgarcgctgttgccctaggggatgtcctgcccctgatctgcacccaggtaccttttgtctcctggcatgacatagcagtttcttcctcaatttcatggtgactcactttttaaaaatagtctttgatgtgtcaaagcctttttatgaaggtctaaatagattgtatggactggttccctttcagtcacatgcatttttacctcctgaaagaaaccctactaaattagttaggtatgattttaccttcctgaaaccacacacccctcactttccatgcttcagtgcctttccatagctgttcccacactaccagtacagcctgtcctataaggtcatctcataccagcttaagtactatctcctccatatcttcccagtttctcccagccaaaaattctccttgcatctaaacgacaggccaggcgtggtggctcrtgcctgtaatcccagcactttgggaggccgaggtgggtggatcatttgaggtcaggagttcgagaccagcctggccaacatggtgaaaccccgtctgtactaaaaatacaaaaattggccgagtgtggtggcacatgcctgtagtcccagctacttgggaggctaaggcaggagaatcgcttgaacctgggaggcagaggttgcagtgagccgagatcgcaccactgtactccagcctgggtgacagagcgagactctgtctcaaaataaataaataagtaagtaaaaataaactcccatagcaacttctctagagacttgtaatatcgttatttgaatctctctattatctctctgatggttcaaaagctctttgatgtcagagaccatgtctgatcttttcatacagtctctcgagcttagtaagaactctgtatatgtttggtaagttaaattaatgaaagctaaggagaaacttcttgacataagtatactgcatcaacagcttccattcacagttgagtctttgccatcaaattgttgtacagaaattgtttccactgaagttacagatgctccccagtgaataattctgtgctatcttttcagccatcagcttcttctgcctctttgccacattgggatactccttgtgatcaattctcacctcctttggctttctctgtcctgctactcctgtctctgattatttcactgttttcttgtccatattatcacatcctcctaaattaatgatgatgttttttctcctcagacttttcttttctctgtttgtccgcaggaatctcatttactcaggttttgtttgggattggggttgggagggaagaaattgagggactaagactagkgggggttagatccctccaggatctaaacagttgagagactaaaaaacaagaaacaggtggcgacgtgaacattgaggtatcagttctgttaacagactgctaaacctcccaagttaagggctctttcataaagctagattggagaagaaagttgagagctgtggtccaagtggagcctctgcttctgagcttcagaccctgtggaggagacatgtgttgctcagatccagcctggtggcaggttcacctcacacagccatccagaaggtagaggcctggatggtgctggaaggtgaggtgaggccgctcagactgcagacagcttcaatgtmgcaagagacatgaagagtattaactataggcaaggccttctgggaactgaagaaaaaccaaacctcaaggcctcatggaaagatgatccatgggatagctggttttcacagagactggaacagggagaacattttgaatctaaagttgtcttgctgccctcaacagcagggttgtgactcttggctctgatgctctgccactaatgtgggcgctagggcccagcatctagcgcagcctacagcatccaagtctctacacttctttgtctgcttgtgtctcctaccaatcccccaactgtctgtacttcccaatttaaattcccaaaagagagaccctatctgcctctaggtggatgaggagtctatggattaccttcccttgagcccatgggccagttgtcagtggccagaggggaggaagggtcatgtggttaggatgcagcctactttccatcaagcaacagtcagcatccatttgcccaagcccaagctagatatcattctcttcccttcctgtctcactcatgtcccatcagtcactacatcctgaagttttcccttttaagcatttttttttggcatttctccttttttctctattcccattgccatcgacccggttcaggccaccatcagttctcacccagagggttgcatgagtctcctccttattgatctccctgtcttcagtctctctcccctaatctaccttttactcagttgccagaataatcaatttagttcccacataatggcccaagtttatatttaaaaatataaatccgactctgttactcccggggttttaagcagggcttctcattgctaatgaaatagaacacagacatctttctgcggcctgtacaccctcctgcagatgcggctcctgtcttcctctctgacctcgttttcccacctcctgctttctgtgctctgtgcgccagcaacactgaccttctgacttcttctttagatgtagcagggctgctgcgcttgcttttccttccgcctggaactctttctcttgatcttttcttagcttgcttctgtctccaggtctcagcctgggtgccacctcctcagagaagccttcctgaaacaccctgtctaacactgcctgtacctctacccttggtctccgttacatgctttaatattcttcgtactgcttatcactgttcagtattttgttcatttcatttgtttggttgttttgtatctccctgactaaaacaaaaattccttgagaataagaacatttttgttcttactcaccactgtattttcaagcctagtgtgtcgtagtttctcagtaaacatctgttaaactgataaacagtgaaatctcccttgttactgtttttcccacggctgtgtcttgtgtttagctttatatgtatttttattttacctgttaggttgtgagmtacttgagggaacaattttcttttagttcatttttacgtctctcaggcttacacatggtaattggctgaagataagtataccccaaaaggtagctcatttgctgcataatttgtgctctggaaacttgtccaatggcagaaagactgagccctattcttcttcatactccctttagattccttttattccacttcggaaaccagacacaggaaacatctgactataataaaagattgccagtaaattctaggtttcctcattgaacaaagtcatgtgcagcaaggctgtgctgtactttggtctggaattcagtttggtcacttgtatggcaggccacatggctgcctctggcctgggagcyaggaacagctggagcctgggatgactgaagtaaaaatgacatatttgctagcctgagagggagaagtctggatattcttgctctgttccttgcaaagcaaacttctyaatttgttgaatactaagttttcccgttagctgtcaaagtggtttataactaaaataatcttacgtcctttagaataaatcacaaataatgaatggccaaactgtttctgaagtcaaagcaaaattcatcaaaacaaaattcatcaaacctttaatgctcacagcagatttcatttaaaaacttacacaaaacatgaatatgtcaccaacttcctctgaaaatttctgccctctcacttgcctcttctgaagtttaaaaatgtgtgatcgtaagagcattccrctaccattggaaataatatttgcaaagactttgactctttccagtagactgtcacctgtttgatgcttacccttatcactttatttttatcttaagtgcttatgaagtggtctgtcttccttggcttgaaggcgaaggctatctctaatttggctccatggggcctggcgtgtaatagccacttgataatatttgtgagaaggagggagaagtaaagaagggcgaggaaagcccagtccatttagactgatattgttggggtatatttaagtatcatgaactataaggatgacctcagtaattaaagagaaaagctcaacagcgtttcagcatgtacagtgaataatgaaggcattcaagaacctgccatcctttggcattggtaccagtgagttggaggttaaaatcctagagcgggattcagaagttctgttttgaactttttgtcccctcaaacaatgcaagtaatacatgtttactgtacaaattttacaaaaatgcagagaataagcattactataattctgccacccagagacaaccatgtttttagtctcttttagtcttaattagttttagtcttttagttaacttttagccttttttctgtacatgtcatttgaaaagtttaaaagagactttatatcaggactgcttgtgagtacaaagaagataaattgcaattggaaaaatacttgtcaactgcaataaaaatttgaagtgcttgtttttattgttgctcatccgggcagtcagctcctcagaattccattcccaatcttcttcaggggaatgtgatctctcgcctggaaaactcttaggatgcttttcttattcctcctctgcrgagactctttgtgtgagcactcattttcctagggtgaggccaggtttggacccctgaaccttcacaggacaagcacacttcaggactgattggaactgatgggagtcaatacccagaatggattttacctccaasttgtaaaatatcactcagataacatcacctttgaaagaaagcaagaatatttactagcttatttcttagttgaataaacatattgaccactttgtatgtatcagtcattagttaggcatcaaagcctcaaaatgaatagacagtctttgtcttcagggaactttcagtttaatgaaagaagaagaaaagcaaacaaggattatagtgcagtataatgaatgccataatagaagcacagtgatggcctaaagaagtaagtgagcagaattgatcagagaggtcttcaagaagaaggggtcaattgagttggtcttaatggaagagtgggaggttttttttttttttaatgcaaacctgcagagaagacaatgtgttcaacgtctgaagacatgaaggcatgcatctcttgggaaatataagtaattttgcatatctggaactcaaggtggtaaatgaggcaaatggtaaagacattgaatgtcagagcttgaactttatcttacaggccacaggaagcctctgaagggttttattaaagaacagagacacaatctgttatgctttttggagaaatcagtagaaaggatggatggaaatgggctatgttggaggcagaggtgtgttttgggggcaataagagcagtcccagcaaaagatgataggcacatgtccagaaaagcaaatctatagacagaaagtaacttggtggttcctggggttggaggttggggcagggaatgactgaatggacatgagggatctttctggagtgatgagaatgttctaaattggattgtgatgatggttatggagctctgttaattttctaaaaatcattgaattgcacacttatatgagtgaatttcatggtacgtgaattatacctcaataaagctgtttttaaaagcaggggttggaggagtcagtcttctcaatgagaggagataaatgtgagaaatgctgataaagaagtagaattggccaggcatgatggytcgtscctgtaatcccaacattttgggaggtcaaagcaggaggatcacttgaggccaggaatttgaaagcagcctgggcaatatggcaagatgctcatctctaaaaaaaattgaaaagttagccaggcaggctggcacatgcacctgtagtcctagctgttgaggaggctgatgtgagtggatcacttgagcccaggaattagaggctgcagtgagccacaattgcaccactgcactccagcccaggggacagggcaagactctggctctattaaaaaaaaaaaaagtagaatttataagagttagacattgattgtatgagatagggtggtcacctatctgttcagccaagtgtcctgattgtgattctacattttgtaaaaaagtggcaaccctacctttttcttggcagatttcaaagcatatggatctatctttaactggcagtacagagtacctgcctcagaaaccacatcctccagctctctgccacccagttcttagcaaacacatggttgtgagaaaaaaatatcgatgaaagagtgtctgaagatttgtgattcattcatttttctgyacattgttattcagcaaatattgagtgccaggtgtagcagtgaataaagcagatttggtgtctgcctttatgaaacttacaacctagcagtgggaacagatgttatgtacagttatgataactattgtgttgaatgtccatgtgcaatgagagaaaatgcccataatgtttgggtggggtgtggctctagactctggtgccatttgcatccggctgacactcctttggagtaagtctgtggaatctgatcccttttgagtctggggtttcttgggttatcttgggccttacatcatcttggtgccccttataattgcttttattgaactctatgtttaatttatgccatcatttggcattggcttatgttgtaggaaacagccatacaagatttacagctgcttagtatagaaatgtagaatatacaatcttcaacatcatatggcgtctcctttttttttttttttttgacatggagtcttgctctgtcaccaggctggagtccagtggcatgatgtcggctcactgcaacctccgcctcccaggttcaagtgcttctcctgcctcagcctcccaagtagccaggactacaggcacgcgtaccacgcccagctaattttttttttttgtatttttagtagagactgtgtttcaccatgttgaccaggatggtctcgatctcttgacctcgtgatccacccacctcagcctcccaaagtgctgggattacaggcatgagccactgcacccggccggcatctctttttctaaggcccacaagagaaagttctctctgatcactgtacagtatttgcttttatgttttggtmtttcagttgctctggagcaccagactccattttgcctcaggtcttcacacatggccttccctctgctttgaatgtcctattccattcttgttgggtttgaccctcacttatccttcagctatgagttcaagcgtcacttcttcagagatgtcttccctatccagtacccactccccttctgtactcagtccagttcctaatataaactttaataacactttctttttttctcttttatcagtttctagttaaatagtttgttctttggtaacatttttttctcctagactgatagcagaaagatcaataaggatagagaccatgctttttctgtttgctgctgtatctcagtcatagtatagtatcttgcacatagcagttgcccagtgcatatttattggacatttgawtgaatgaatgaatgaatgaatgaatgaatgccttgtgggtactgaatcttgtaaccattcatttccttttttctttggctgtttgaaggctcaggccctgattctgcctgcggtgtttgcgtaggtactcatggcatgcattttgtgcactaacatttccccaactatatagtctttttcctttctttgacatcttcattttaaaattctagtgtacattgtaaatttcaataggccactataagccttttttggggaagaaacaatgaacaattgagtatataagtagaagaaagggcaagatcaaaggggaaatgttagtgcctttaactagattcaggaaggaacttttattttgctttgttttaattccattttcactagaagaaagaaaaagaagtaaatttgtcccctaatctggcaagaaatgcctctaaagaatttggggcctgtccctgccttgagacgtctctccctctggcaggaggcaaggggtactgggctgggcagggtctcctggctcagtggatgggtgggcatgggcctgggaggctgsgctgttcgactgagttcccttccagttgactctgctttgagggagggtttgggcagagccagtgggagcttgcttttttattataagaaggagaaagaaatgaacttgtcctcttgtgttgcagattcagtggttctttcctttgactccgctggacaaacactaggctcaggtaccaactcttccccctctatcatctttttggccttcaatattagccatattttttgtgaagcctaatcaagtatgggtttgctggggagggcagtggaatatcccagaattgggggaagtctcaagaagcctttctagagactttatggtcagggaagcagaagagggacatatccagagaacttttccagttactttaaaagtkcacagaggagttrcagtagatgctccctcttcattcagagttgtcaagagtcacataaaaggatgtctgttttctgtgcatatatcctgtctcagaaggtggggcagagggcattgaaagaccccaggctgtgggaatgctggagcagataaccatcagggctctctactagaatgctgggctggtgggagcatcccagtttcctgaggacatacactccattgcatgtttacatgcacaccccatatattcaaatacagacctcttccaggagaggagtaccacactgtactgtgtactcatgccaaaatgcwtgtaggtggacacactccttctcttccctgtttacagtgcaggacacacagatcagcacacctgccccaaattcacccagacccagtggagcctggctctgccatgtctagggcagtttacctgttccacatcactgtgcctgttgacaggaagtgggaagagactactttgattcctcagcttgctgccattgggtccctatgggagcctcagaatgacgtgactttgagggaagagtatctctgtgtttttaggtaaagtcaggtgggcctcataccatgggtactgccagtgaatgccagggagactgctggcctgttgagggcagttaattcattttgccgtccttagatatggtagattgatgattcacaaaacagccatgarggtcaggcagttgtagtagagtggacaagaggaaagacattcagagaatatgatcacagccaccactatttactgagggtctgcctgttttactgtgtgccagcactgtgctgagtgcttgatacacctctcagctatctcttacaatcgctttttatttttattttttttatttttaatgtttatgggtacatagtgggtrtatatatttatagggtacatgagatgttttgatacaggcatacaatgagtaataatcacatcagggcaaatggggtatccattatctgaagcatttacggtttatttgtgttacagacatttcaattacactcttttaattatttcaaaatacacaataaatttttgttgactataatcactctgctgtgctatcaaatactagatctccttacaacagctttgatatctttaattatagataaagaagctaatgctcaaagacatgaagtaacctgttcagggccattcatatctgtctaactctagagcccatcctctctcccttagcatctttctatctcataccttgtgtgcttcccaccaaaatgctgaggctatgagaagtcactttaaggtagagtggacagacagaaagagttcttaaatggatccaaaacttgcatctatttgtatagtaaaagattggtcattttattacataaaagttgagaacttctattaatcaaaagaccctattaagagagtgaaaaggcaggctggatgggcatagtggctcacacctataatctcagcactttgggaggctgagacaggaggacagcttgaggccaggaatttgtgaccagcttgggtaacacagtgagaccccaactctacaaaaatttttttaaaatagtaagggcacggtggcgtgtgcctgtagtctgaggtactcaggatgctaagcaggaggatcacttgagcccaggagttagaggctgcaatgagctatgattgcaccactgcactccaacctgggtgacacagtgagaccctgtctctggaaaaaaaaaaaaaaaaagaaggaaaaaagagagagagtgaaaggaaatccagagtgaaaaaaatatctttacaacacaaataatcaacaaaaggcttgtttccagaacaaagaacgacagaagtcaataggaataaaggagcaactcattacagaaatgagcaagacttgaacaggcatttcacaaaagagaaagtccaaatggccaataaacccaagaaaaggtgtttgattgtattagtactcagcaaaatgcaaattagaatcccaatgagatatcaatacacatctaccaaatggcaaaacttgaaaagcttgacaattccaatgttgataaggatgtggtgcagtggaaactctgattttctacttgttggagcataatttggtacaaccactgtggaataaactgtggcagtatctagctaaatttggatatacacatacctggtgacttagcaattcctcctctaggtatattatctgcagaaatggatgcttatacataacaggacatatatatgcaagatatgtgtataagaatgtttataagaasattgttcataattgtcaaaaaccaaaaacaatccaaatacctaacaacagtagaatgactatgcaaattgtattatattcatagggaacagtaaaaatgagcaaaccatagccagatgcaacaatatggataaatattaaagacatattgttgggtgaaagaagtcagacaaaacagtacatactgtgtttatcctttcataaaaagttcaaaaacaaatgaaattaaaccatatttgcttttagatacataattcagtattaaaactataaagaaaagcaaggaattgaattctataatagctagatggtggtgttcaagggggtatgttgagggatgggtacaggggggcttctagtgtgttgatatattatttttagtgacctgaaggggttttataggtgtccattttacagtaactcactagctgtgctttgtattaaaaatgtaaaatatagcaaatatatagaaaagtacataaaacctcaatgtacagctaataatgttcaaggggattttggtcctcagcctccatctcccttggagttataaaaagatcttgggcttaatctgcaaataactatggaccatggcaataagcctcccaggtttgtacaaggttctcagtgaaggctggcaaagaatgagaattcagacatttttccactgattccctcttagtggaagatagatcaagttgattcagagtcagcctcaaattataactggttttcagtttacctagccttcagttttcccgacaacacctaccagcttcgacacctagttctgccttattcatgctctcatggaatatttgcaagaggccaatagttttgctatctcctgctttgcatcaagcctaaaagggaatggtaaccargcaagagctgggyagaggtcttcacagtggccactttactgttttatttggagagaatttacaaagcgctgggcataccacatcgccaaaaacgttttagaactttagcaggataactttggaattaatccctatttgactttctttctgttagtgtaggtacttaaaagtaagaaaaaggttccagttccagataagacagagtgagcacactcactctatctctgaatgcagctaaaggcctgttcagaatgcatttaatagcagtttgaggactctgaaacataaatagtagcagacagataggggaagaataccagaattcartgtattactgaactggcagtgagtttcctattttcccttcagtgtcccatgtcttggactcaaggcaccccaaaccccagcaatggacaccaaggcacaaacagcttcaggaaaagacctctagttaaagctctggggtgggaaaagggctcccaaggctcagacagaggggaatatcccaagagttgttccctcatgccccagcccccaggcaatcccacagtgatggtggttgggagagtgccagcagtaggcccttcaagcacctaaaactgagagagaggaactttcctctctgatcagaggagctatagtcccaagaggatggggtgcaattttggttgcttgttttctgtctttgtcttcctgctgcttggccccagatttgagtgcagttcagaaaattcatggcagaatgtggtaattaaagccccagctttctggccagaggcccaggaaggggagtcacaagaaaccagaaggcaggaaagagaaagcaaagggaaagggagctcaggaaagcaaccgctttaagttatttatggacttcaggataacccaagctgtgcaggtatgcatctgattctaaacaacataccaaagactttcagaactgacctaagggacagaccactgcccaagtcccagactggatgcacacacagaggactcttctgaacaggctttgaaaatggaactgatgttgaaaccacaacccacagaaggctagttggaatttgctgcccgaacccaacctggtcgattgtctgctaaaacaaaaatatgaacattctccactggatttaaacaagatgtagagtctcataataagattcagaatatcccagatatgaaccaaaatgaagaaccaggaaaatttgaacttgcatgggaaaagttaatcaaccaatgccagtgctgaggtgacacagatgtttgaataatctaataaagactttttaaacagctatgataaaaatgctccccaaagtaaaggcaaagtctgttgaaatgaatagaaaactagaaaatctttgcaaaaaaagtaaaggttaggtgcagtggcccatgcctgtaatcccaacactttgggaggctgaggcagaaggatcacttgagactaggagtttgaaaccagcctgggcaacattgcagagaactcttctctacaaaattaaagaagaatattagccaggcatggtggcacacacctgtagtctcagctacttgggaggctgaggcaggaggatcacttgagcccaggaattcaaggctgcagttagctatgatcacaccagcctaggtgcactctgcactccagcctaggtgacagtgagaccctatctctaaaaaaatttaaaaatattaaagatttttttaaatgaaggtcttagcaaacaaaaaaagaggaagaaaatataaagaagaaccaaataaagcaataaaactatccaattggaacaacagagaaaatcttttaaaagttgaacagagcctagtgacttgtggcacaatactagaagatttatcattcgtgtcttcrgagttccatatgaaatttttgaagaaacaatggctaaaacgtcccaaatttggtgaccaagtgtggtttatcctgggaatggaaggctggttcaacaatgaaaaaatsaatataatccaccgtattaactgtctaaagaaaaaaaactgcatggtcttattaattgatgaagaaaacgcatttgacagaattcaacatctatttatgataaaaacgctcagcaaacatagaaaggaacttcttcatcctgacatcggccatctacaaaaacctacagcaaacatcatactttatggtaaaagactgctctccccctaacatcaggaaatacttctggaaggtctagtcamtgtaataaagcaataaaaaggatacagaatggaaaggaagaaacaaaattaaccgttttcatagatgacatgattgcctacataggaaatcccaaggaatctacaaaaacattcctagaactaataactgagtttagcaagatgacaggatacgaggtcaaaacacagaagttcatcatgtttttaagtactagcaatgarcagttgaaaaccaaaatttaaaacacatagcagcttcccgaaaccaaatacttatgtgtaaatgcttatatataaatctgatgaaacatatataggasctgtatgctgaaactagttcctctcccactttttcttccccatctacccaactgaaagttcaggctgcaaacctagaatcaccctgattgttcctcttcctttaccctctccccctttcctgtcttcacaatgtgttcttctctagccgcttctttctagcaccactgcccaaggtaccatcttctcttccctagactagaaacatctcctgactggcctgtctgtgccacttattgccttctgtaccttgtagccagagtaatcttccagaaacctaaatcggatcctgtcttgttaccactgaagcctctccagtgaccttacagtacatttacaataaaatccaaacttgtccctccttcctgagtcctacttaacctctccaatttccctgtagttcatttgccttcagcccactgccctcacgctacattggcatgcctgtggctccttgaggatgtcaggtcctttcctgcctcagggtctttgtgcttgctgttcccacttcctagactgttcttacctcctgctttgcgttgctgtcttcaggcctctgtcccactgtcacctccgccagaaggtcttcccagaccacttcatctaaagtagtccactcctctaaccagtccttctctaaaaaagtatgtcttcagtttttcttagcatgcctccttccttcaaactatttgcttatttacttgcacactgtcaatctccccyactaaaatgtaggcttcattttggccaaggacttggtctgttttgttcatcactgtatcgccrgtatttagaatgcgtctggcacataataggtgctaagtaggtgttaaataaataggtgttaaagaatagaaaattaggaacaacaatattcactaattaaggagtgcttgaggtcaaataaataatggcatatccattcattggagtaactgcagtcatttaaaatgatgatgcagttttacttttattgacacagacgatgtcgaggatattgttgagtgaacaaaacaaacaaacagcatgcatattaaggccaagtgtaggtaaaattatgtatgtacgttcatacatatacagtatttatggaaagagatttctgggaaaatagtcaccaaaatatttgtagcagttagccctaggtaaataggggtttcaaatggttcttacttcattctttataagtgttttggatttggatttttgtattgagcatatgttattttaataactgggaaaaaattaagttatttttgtttggggagtagagctctctcttattttgtttaataattgctttgtgattgtcgtagtctctttgggctgctataacaaaaataccttagactgggtaatttataaacaacagaaatttattgctcacagttctgaaggctgggaagtccaagatcaagacatcagcagattcagtgtttggaaagggtccattcctcatagatggaaccttctgtgtgtgtcctaacaagacagaagaggcaaataggctccctcagccctccctgataaaaatatcaatcccatcctaggggtggagccctcatgacctaattaccttctaaaggccctacctcttaatactatcacattggatatcaggttccagcacatgaattcacaggggacacccaacattcagaccatttcagtgagtatttatgccctatctatcccatgaggtggtaagctccatgaagtttaagatacaaactgcagagtgagccattttttccyatttcctgtaccagcagctgttttgacatgctgtccctcctaatcctcctgcagcttagtgcaagatgccctgggatggcccggacacagttgatgctgtgaataggattaaattcactgcagtactcagccctagatatctgctattttcccaagacagaagagagatagatgggtgcagtgacatytttggctgctgtgggagggggcttccagggctccttctgtagcctgtgattctcttacctggggccaaggacatgtcatgctcccttggcccccagtatgccacgttggagaagagctgtgctgtgctcagatggaggcctgatagtcacaggggactctgttaccagaagcttcctactaggcctctcacctcccccacaccaacatacacccatttgagattggatcttagtttgtaaacttctaagttattttactgaatcagttaatttagtctaggtcagtgggcttttctgtgtttattttagaaaaatgcttttccttttagtttctctttgattaattgatcccatgttgtggtttatttccctgacttgagatgatgtgggagctatttgcactttggccagaccttctcaggcctcttttgactcccatgattcatgtgtggtatggccagggccttctgacatcaccctggggcaggagatgggaggtaatagtacatcattgctgtcatggaaactgtgctgctaatrtgagggtctgcttttcttgtttcctctgagagtcattgtgggcataacgtaaaggaaagaatcagccctgggttggttccacggcatccctgctagcctacttcatgattggggratcttgaacatatctcccctgtctaaacctctctttcctcatctgtaaaatatagtacctgcctcatggggctgtataggtgacagtactgagaacagcatgaatacaarggaagatgctcaataaatagtagttcctctcagtcccttcattctgcaagcctgacagcccatttggaactattgccaacttcttcctccacycaagccatggcatatattacatatgtttaatataccccatgacttttttttagagattgtacagtgacatttcttaagaaatgatagagctgttttggctagggtaggtcctcattccatttactgccattcccttcgtacttagcaattcatcatagcccagagattggagccaaagaccactttaaagaagatctggcagcagagctgcttctctgggtaaatggagttttcttgcctcatggactatcctgcctatgtggctttgtgaattataattcgaagcacggcaatttctgatagaaccaagttcatgtttttatcccataaaataccaaactttatatacctcaataatgctccttaaattggtgttcatgggcaatatttgtggttgtcatcagtagcagtcatttaataagcatcttctttgtgccaggtacagtgacagctgattggaatttgtggtggttcattacaatgaaaaaaggaagtgggtcactcacaacggaaatgccagtagcatgttaggctcatcatgtacaaccgtattccttgaaattccattctggggctcagtagcctgaaggtgaggctacagtaggacacctggcttcaggaaccttcaagaagctctctcttttgtcctggaacaggatgtgactgcacagcctggtgctcccaactgcacgtcagaatgtaggtaggaagtaatacttatgtgctatactaggacaaataggagaggacttggagttgtctacatagggcattgtgaaaacatttgtgatttttttttttttttaatattacagaactgtgatgaacaggccaggtatggtggctcacacctgtaatcccagcactttgggaggccaaagcaggaggatcagttgagcccaggagtttgagaccagtctgggcaacatggtgaaacctgtctctacaaaaaaataaaaaattagccaggcgtggtggcattgcacctatagtcccagcagcattgcacctctagtcccagcagcattgcgcctttagtccaaactactcaggaggctgagatgggagggtcacctgagcccaggaggtcaagagtgggacgatcygagtttgcaccactgcactccagcctgggtgacagagtgagaccctgtgtcaaacaaacaaacaaacaaacaaaccaaaaagaactatgatgagcaaaatgaaacacaaagtattaagaaatttattaaatattgaattgctataccataaaaatcttttcaagtttttaattaaaaactagagcttgtttyggtgttcataaatttttattcaggagttttgtctgggaaggcttcacataactcctgtcaaggctttttaatgatactstcttaaaaaatactcagttatcatcaaaaactcacacaaataactgacaaaaatataaaatcatttttatacttattcagatgtttacagcagttgaaattatattttaaaaatccaacagytcttccttttccttaatcaaaattgtaaggttgaaatttcttcagttagaacaaatggatttcaaatctaatctcacttttttgtatcaggtatttcaaaatagcgtgaagctctgttgcaaaatgtatatgaattcttagagcagtcaccctggagttggttggagatcataaaaggctacattcaatgcacataagcagcgatactacccaatatgtgagaacaggtgtgttgcccttcacctggagctgtgctcccctgggagtccccacctggctggcctgccactgaccagcagcctcttgggcaacactctgctccatgagtttttcatgcaacatttttcatggaacataatttttacttgaaagtacaattgacagactgtggttttttcagactttggaatttggcagacattttctcagtaatgaaagtgagcattatcacttcaagggaaataactgacagtattttgttgccggcaataaaatgttattccatgcaatagcttctcaatacttaaattttaaattaagagttggaggctgaccctatgttatggcctcacagttggttggtttttgttttgttttgtttttgtttttgagacagagtctcactctgtcgcccagtgcaatggcgccatctcggctcactgcagcctccacctcccgggttcaaaygattctcctgcctcagcctcccaagtagctgggactacaggcacgtgccaccacacctggctaatttttgtatttttagtagagayggggtttcactgtattggccaggctggtcttgaactcctgaccttgtgatccgcccgcgttggcctcccaaaatgctggaattacaggcatgagccaccatgcttagcctggtcgggttttgtaaatgctccctacatgtcttgtaggccgggcacagtggtacgcacctagagtcccagttactcgggctgaggtgggaggatcacttgggcccagcagtttgaatccagcctgggcagcatagcaagatcccacctcaaaaaaaaaaaaaaggaatgtgcattcaccatttgttggatgtaaggttctctgtatgtctgttagtttaaatttagtaattgttctgttcaaatcttctgaattctcacagactttgtgagcccgatttttcagtggtttatgatggtagaccaacggtgtcattttcttttagttctgttaattttgctttatatgtaacaaggtttcattattacatgtattcacactttaatgcatgggatccttttgtttatgtccagtttctgaaccttttaagagtttacatcagtgttccagtgttcatccaacaagttatatgaatcttttgctatgacatctagactgacttattcctttaaggcggcaatggaagagttaatggttaatttcaaagacgtctgaaaaagcactttgtgcattcacagctctgacttggtgcacgtgcaggaggggaaggtcagggatttgcatcagccatgtcactccccacctggagctgggcagagacacacgtgctccttggtcagtgatttttgtaatcctgggctttccagcctggccaaagcaggaagcctaagccatcagactaaacacttctgctggctttctgctttcatacctggggaggagagtatcttcaggtgctaggagagctggaatatgagtgcatattgtgcctggctggcctgggattcctagagtgttctgttctttgtacagatctgggatcattgggctgctggtgagacccagactttcatgccactacccgagaggtgaatagtccctgaagtgttggtacactcaaaatagcagttcctctgtataaggcaaattcacatgcaactctaagaacacatttgtataaaggagatgcgctgggatctgtaaccttgcccaaccccagcagtagagaagctctgctcctgtattcctggagtataatgcctatgccttcctgattgctttcttttctcatttacacttcctaaagatgatgcttaaattttcctgctagtcagggaactctgtgaggggccacacacagactgaataatcagtaacatgactatgaggctggggctgagagtaaagtgcttgtcaggtaaagaccttggttgagatggagcagacagacgccagtgactcaggtgactcaggaagtctttgtggagagggttaaatttcaggcctttatacatgatgggagggaactaccttggcaaactgggagttcttaaaagggaaccccaaagcaaaacycagaaaatagaaggtgtgaagggcattaaataaacagtgtggcagacagttagttgcgcctaagaagagccagaggaggctcgctgtgggcaggtgacagtgatgtaatcagataggctgggagccaggaagggccagagcaagggaatcactgcagtcgaagatggcaggcgagggagaaggagagggagaggaagcccctgctgctgccatcactgctaccaccagcactgccccctcactgcaaggggtggaggaagacaaagactccaggtctcagggcacttactaggctgccttgcttatttggtcactctttccactcttccatccattcagtacattatggaataccaactctgtgccagatgtgatattgggtgcagaggtgagccctgccctttatgagaacccaaatacatgtaagctaggatagtttaattgaaagcaacaaaaactgactggggataactgtttttaaaaaggaatttaccagaaggacatgggtacccacagaatccaattggaagctaaacatcgagccctcagaaagaacatgaagggcagccccaggaatctaggttgcaggaacaagtggtccccctcttcagcacattatttttctccctcgtgtcgctgagtttagggaagaaattgtcccactaacctagcttttgtcaggtgcctacactttggacataaatcccatcgacagtctcaccacttgcctgcaatgggagaagagcagttccctgaaggaaacccaaggggcttgtttctaaaaggacagaaacaacagatgtgcattgcaggttcatgaataagttctggaagggctggagagcacagataaggtgcatttaggctaacaagttagatcagagaagatgttgttcgttcaacattccttccacatgccaagcatagtgttaggtgatgcacctgtgaggaaaagaagagtcttagtggaacttctagactagcagaggagaggcgtctgtcggtaaatgtataatcacaaactggagaaagtacactgtggcacaggagcatttgaagggtgaggtctacatagggaggacaaggaacgctcttcttttttttcttttcttttttgacggagtctcacactgtcaccgaggctgaagtgcagtggtgcgatctcggctcacggtaacctccacctcctgggttcaggcagttctcctgcctcagccttctgagtagctgggattacaggcacgcaccaccacacccggctaatttttgtatttttagtagaaacggggtttcaccgtgttggtcaggctggtctttaactcctgaccttgtgatccgcccacctyggcctcccaaagtgctgggattacaggcgtgaaccaccgtgcccggcaaggaatacttttctaaaagagggccttcgaactagggtctaaagaatgagcaggaattaaccgaataaagaggtggcttattcagggaactgaaagaggccaaaatcaccagagcacagagcaggggagacaatagtataagacagggatagaaatttagggaaaaatgtaaaattccttgttgtactataaaaacatctgtgaaattgagctttagtgatggctttatcttgaaggatgagcaagatgagtgaaggcattgtaggagaaatgtcacctgcagtagctctcaggcataaaggctctcaggcataaaagaagggagtggcaggagatgaggctgagaagacagatcaagaggttgccacgtgaaccaagcaacagtgaagactcaagcaaaagcaatgacgggatagggaggggaacagggtctgcatgtagaaatgagagacattagtggtcaccaaaaatttccttcttggaggactggatggtattgccatcatttaaaaacaagaaggatcaaggctggaaggctggggaacaggcaaagataagtctgatttgtaccattttgagctagaggtaactgtggatcatttaggaataatgtgtaggaaataaccaatgtgaaaagggattgggaaattatttaatttaatttttttattttgaaacagggtcttactcccgttgcccaggccagagtgcagcagtgcagtcatggctcactgtagcctcgaatttccgggctcaggtgatcctcccacctcagcctccccagtagctgggaccacaggtgcacaccaccatgctcgggtaatgttttgtatctttagtagagaccaggtttcaccatgttgcccaggctggtctcacacacctgggttcaagcgatctgcctgccttggcctcccaaagtgttgggattacaggcgtcagccactgtgcccggtagggaaaatactttaaataaagagaaagatatgttcaaaggcctggagatgataaagttatgttggagaaagataaaacagttcagcctcgcaggaacatygaatatggcaggggtgatgctgggaatcaagaagtgaagtaggaggctgggcacggtggctcacgcctgtaatctcagcactttgggaggttgaggcaggcggattacctgaggtcacgagttcaagaccagcctggcaaacatggtgaaaccccatctctattaaaatacaaaaattagccgggcgtggtggcacacccctgtaatcccagctactcgggaggctgaggcaggagcattgcttgagcccagggggcagaggttgcagtgagccgagatcgtgccactgcactccagcctggccgacagaccgagactctgtctcaaaaataaataaataaataaataaataaataaataaagtaggaatgatatctataggccaggtcttgggggatcttgtaggtgaagagattgggatttgttctgagaacartagaatccaaccaaatgttttaagcaggattgtgatatggccatatttatcttacagaaagatagctctgattacagcacagagcatctattagacaggggcagggagacctggctataacaggaggctagtacagcaatccaggtgagaagtaaagctggcttggccgagaagagtagaaatggagaaaagtaagtagatttgagatccatttagatttgagatccatttagaacatggaattaaaaggtcatagtaatgaattagaagaaagaagagagaagcaggaataaaggaattctctcaggtttcaagtttgggcagctgggtgaagagtggtgttgttcgttaaggtgggaaatccagaaagaggttctgggtgtgtgtgagggtgatgaagatgaactctagggggtgtggtttaggttttaagtgtctgtaggacaccgaactggagctgtccaggaagcagctggatatacacatgtggagctcagccaggcacagcagctcacacctgtaatcccagcattttgggaggccaaggcaggtggatcatgaggtcaggagttcgagactggcctggccaacatagtgaaacacggtgtgtactaaaaatacaaaaaaattagccaggcatagtggcgggcgcctgtaatcccagctactcgggaggctgaagcaggagaatcacttgaacccgggaggtggcggttgcagtgagctgagatcacgccactgcactccagcccaggcgacagtgtgagactccatctcaaaaaaaaaaaaaaaaaagtggagctcaggagagaaggctgagcaggaatgagagatttggtttgggcgcaatggaaagataattgggcaggctgaactgagtgttgagcaaggtgaggtctagactgaatgaaggaaaagtgaagaaaggagaaacgactgagaaaaaaacagaaaaaaaaatatggaaatattttcagacattgaacaattggtagcacagggcactgatctctgaaagaagggaagcagatgaggttagccctgtaattgcccaagccaacttcctggagagtttgcagtccatgtcgcagggaaggagaacccaagagtccgaagctgaggtaacagttgagcatttgaggagaccagggcaactagaattcacagatcatcagagaggagagacctgcacagagagagagctcaggggatttgttacagttcccccttggacttstcagctgatgagtacatgtggatgggaaaactaccagaatctggggaaagaaccactggaagggggcagccaggataatccctagcagtcacacaggactgggaattgtgggaaaactgtataatgcatggggtatctcatagtgtactcaggaaggtattgccttagcagtggggcaaaattagtaatagtgcaaaattagccttagactagcctttaaaggatcaaactgtttccaagtgacttaattgtatctcaaaaatayttaaggaatgcacaggtatcctgtccccaacaaggtaaaattcacatggttggcagccaatcagaaattacaaggcaattcggaaaagcatgaaaatacaacctataaagagggaaaaaaaacaatcagtagaagcaggcttagagatgacacaaatgagagaactgggggcattacatcatattcctatgttcaataaggcaggggaaagcatgagaatattaaggaaaggcacggaagatatgaaaaaaaactcccagaggtgaaaaatacagtgtctgagatgaaaaatgtactggatgaataatcagcaaattagacactgtagaagaaaaaaatagtgaactagaagatatagcaatagaaactatctaaaatgaaacagagtgagggctgggtgcaatggcttacatctgtaatcccagcactttgggaggctgaggaaggaggatagcttgaggccaggagttcagcctggccaacatagtgagacccctgtctctacaaaaagtttaaaaattagctaaatgtggtggtgcttgtctgtagtcctagctactcaggaggctgaggcaggaagattgcttgagcccagaagttggaggctgcagtgagctatgattgtgccaccacactccaggctgggctatgggttgagaccctgtctcttaaaaaaaggaaaagggccgagcgtggtggttcacgcctgtaatcctagcactttgggaggctaaggtgggcggatcacttgaggtcaggagttcgagaccagcctggccaatggtgaaactccgtctctactaaaaatacaaaacttagccaggcgtggtgttgcatgcttgtaatcccagctactcgggaggctgaggcaggagaatctattgaacccgggaggyggaggttgcagtgagccgggattgcaccactgtactccaacctgggccacagagtgagaccctgtctcaaaaaaaaaaaaaaaaagaaagaaagaaaaaagaaaagaaacatagagtgaaacattactggggaaaaaaaatgaacagaccactggtgagctatgggacttcaagcagccctaatacatgtgttattggagcccctaaaagaaagaggagggcagaaaaatatttgaagaaataagaaccaaatttttttaaatgtgattaaaacccacagatccaagagccccaaggatgccaaacacaggaaagatgatgaaaatcgcagcaaagtatgtcataagcacccccctctcattcccacaggtgcttggcagaggagaggaaaagcagcctcccctggagagcctcaagaaaagcctcgtagggtctgccaggcttcagctgtggcaggaggtagagaygggtaggccgggtggttggaatcgtgagtcagagggcattatgagaagggtttgacagaggactgaggttgagagaaatggggtccgtggctcattgtagctggctatgcattttcctgggagatttactagctctttagttttccaaagattattcctattgttcgcaaggggactttatttgttcaggacaacacatttcttctggtaatgctccttgtaaccatgtgtatcacatgggagtcatcattttccacaaaccccatatcctcagtctctgtgactagaacagaatgaagtactggtacaagctccgccagccctagcctttccccaggagtttcgcccttgggagcagaggggcgaggggcgaatgcaatcccttgccagtggcaaagcagaagatgtttgcctacaggttgctggtggtcacattgcctcatttacgaagaaagctcaccaggagagagtacaggcaatagagggaggccsgatggcctccctctattccagtcactttcggtcacccctgagaccctctgcactctggccccttcctatgttttggttatgtgaaccactaaatccatttgcactaacttcccctgagttagtgcaaccagtatgttgagcatgcaggaaatgtcaaggatcatcacagacatcttcattttgtctcctactgttcccttaaaatgttttcatgtcttcaatacatctgaagtaataaaaattccatggtcacagtgagttgccatttccaaacttagagtgccccatcttgtgtaacagtcacagctttcaactcacagtgccggcaggtgcctggtggggaaagggcatgccctgcctgtctttcctcttccctcctctcccagctactagctgctgcctctgacctctccgtgattgctgttggagggagagagaatgagcagtagagacctagagtgtttgcactctctggacctgacaaatagttaaagctgactctggtggggtgcttttgtgagtgttctgatgacccctttccatyttaggggcctcttctctgcggttcccccagtatgggtaatgcccatgccactgccttgctcctcacttctgcagctcctggaaatcccagcatctacctgttgcttctgttggccragggcctgtcaaccctccaggcagatcttctggaaaggacctgaaacgagcccacaacagctccttcatgcattagtttttgccacagattctgggagtgcaggccagtccccatgcagtgttctcctgcagccagcccgcccattgcccattgtgtcctctagacttgttgggtaggaggtgggccccaggcaacccactgtgttctccaaaccttaaggacgtgttaggcatccttcagaggctggagtgagagacaggtacccatcctgccctgttcataacacagctccccacaaagacgttttttgaaatcctctttcccttcatctytagcaaccgattgctatttatatttgatgtagggaaggcctttagaattacgtgataagtattaagagatttcctttgaaaatccgcatcttagtctagcacttcactgtggtgtctgaaatgtatcaccttatagacccggctaaaattttctttctagcatcctgttacactaatttgatttggacttgagactgytgtgaccaaataatcccgataacagtcaacaaatatttattgagcatctactgtgagcagccacagccctcatgagctgtcagtccacataatctttacatttttcttgaatccatttgccaatgtttataaacttagaaattttaccttaaaaatccagattcctggcttgaaaaaaatctgaagatgtggtaatgcgggscctgcgttgctgcctggcacagttagcaggagctggtgggagccgcccttcagcagggcacacactctccagatggactcagttccctctgggctctgacgctagagccaagggcgagctgtcatttatcatcagtgggttcacaattaccttttcttaaattattctggtactcatgtctcttttctgagggctgtggggatacagtgactcttcaccgtgttgcccaggctagggtgcagtggcgtgatcacagctcactgcagcctcgatctcccaggctcacgccatcctcctacctcagcctctggagtagctgggactacaggtgtgcaacaacatgctcagctaattttttaaaagttttttgaatagatgagggctcattatgctaccgaggcttatctcaaactcctaagctcaaacaactctcccagcttggtctcccaaagtgctgggattacaggtgtgaggcactgtgtcctgccctcatgtctcttaatgaaagagagaaaacaatagatagaccaagagagacgtgaagggacagacttgctttagaaatgcagagttcttagaaatttaatatgcagtgtgtgcgtgtgtgtgtgtgtgtgaaacaaaacaaaacttaagatgccattgacaaataataaaccacagatataattatttttactatacagaaaatatatgggaggaaaaacagtgaattgaaaagaaaagacattgcaacaggatttgttttttaatgcaactaaaatgagtagtgtragccgctgtataagagtattacattctcctacttccctcatttgtgttatgctcttgcttggcccctgacatttgagtttgcaaccatgagggaaacattctctggcctctctggaaggaatccgcctaagtatggattaattgtctaagggagtcttagctcaggtytgaggagcacggcatgagagttcccccagggttttcaccatacagggaaaaagtaacaggtatttggcaagctgaggcttcctttttatggaatggtaagataggattgttgagagggcacttaactttgacactaactctttgcaaattgtatttttcgttttattttatatttaagcctttttttgtttttcttaccaatgtttgtaagttcttgatatgttaaggcaagtctttcatccattcgcctgcgttagagcaaaaccagaattattttgaggaaagactttcacttgctcaaggccattctcttgggaggcaagccttacattsagttgtgtgtcctagttgatatcttcaattttaagaagaggatttattctctcttcacagctcagatgattttgaaagcaatgagtctggccttaattggccttgcagaacgactcctgggaggtacttgtcagcatgtgtgacttccctctttttgctgttcactgcttattaaagcctgagttcctcgaaagctttgctgcctggccttttccatccagtattttggtcttggtattctgttttatcctcagattgagccaggccagctaagaactgcattcataggccactttattttttggctagacacacacacacacacacacacacacacrcgcgcgcgcacacacacacacacacacacacacacactgcaactatggagcagagccataagaaataatcccatgacacttcatatcattttccttatacaaatgtttttgaggacacaggaaatttccctcaagtcttagyatcaagaatagctgtgattctcctggtttattttctggatactgctgaaccatgaaatcagtgctttgcgcttagttttagctatggaaaatcttggggacagatctgtaatcttcctccagcaagcacacagagccctaagatattcacttttgctcttttccttaccccacctgcattttcctatgtttatgtccactttggcccccagatttctttgtactccatacaattttatagaactgcttcaacctcattttagaatgaagcaagatgcaaagaacttaaataaattacaatactgattgatcacttgttagaagcatcaatttatctttaaattttattgtaaacttgctattctttatgtaatctgatctactggttctttatgatgaccatgaagagaattggcatggatttggggacccgttggctgccacatcctcaccccatggctaaggtggctgattcagcaaatgctgtgtttagagcttagaggaagcagatactgcatctgagcctcttgcttttccaggttccagtttcatggtttactaaatttcagttccaattaccacatttatacaggaaggaagacagttgtataccaacataggactggctgccctagaatgcataggaaatacctggcattgaacttggtccwtcacaaaacaggtgttcagctggtgttttgtggtttatgtattkagttacgttctttgaagcagttgaattgtgttcttttccaagggtggtctgtccctgtggtctaggtctgggggatgcaatatgctagtatcatcagtgacttgacttcagtgacattttctgcttttctttttcagagtatgatcggttgggcttcctcctgaatctggactctaaactgtgagtagaatgagaagataccttggctctgtggcagagaggtctgtgagagctgggtctcactttgaagggtcagctctcatcactcttctggtgactgggggactccctggggcctctgtcctcaggctgtcagcagaatcttggggcatgttacagtctgcagcggccagagagggtgggatgatgggtgcaaacataaggccttcgatttggctggcacaggcagctcattatagaaggaggccactgccaggagtttgaaggactaggagtctcctggaaaggcttctcctgcagggtagaggacagttgagtcacagcaggaggtaggggcctctcaaagatgctctggcacctgacatgcacagccttctgtgatcactccctgtcttactctccagtttcaactcctgccactcttgccacagatgaacactccttttccctctacctttgcatgtgcttgttatctgtgcctgaaattttctttccttgctagcccacttggaaaactaaaaaaactacttcctccccacacaaagttgtctcttcctctgtgcttcctttaaattttctacctctgttacagttatctcactatactgtaattgcataataattactaattttttaagggcacaggctcagagctaggcctagtagatagcttggttcaaatcccagactgacctttattctctttatgatttgggtcaagctacttaaccactctgagcctcagtttcatctgtaagatgatgacaataaacttatttcacagagtttttgtaagaatttaattgaaattattaattcatagaggactgtcaagtattgagtatctaatccttccaggatccttccctactaggcttcttggtctctctagcacctagacagtattggcgtatgtttgtcaggtgcccgttaaacactgaatgcttggttggatggatggatggatggatggatggatggatggatgwatggatggatggatgatggtwggatgactgcgtactttcctatttgacaagcatgccttgagttgcagctctctctactctgtgtgttcatgtccctgcaagcctgctcacatggccgatgctcaataaatccttgcagaaccaccttactacctactgtgattcctttctattgttagtcatctttgtgcacctgtgtcccctgccctgtaccaggcggacatcatgaaggatcagaattgtgtctctttccttttctgtcttgcataagaccttttccacagttgactctgatgacgatggccacacctacgtacaagacatcaaaccaggggctggttggttttcccactgaatrgtctggcgtctggcttcttggctctggtgcctcatactatgagttcaggcattgtaaatctcccaacttttacacattatgaaggcaactatgaaggaaaaagtgtgtgttctgtataccaggctagtagagagatgtcagcctcatgttaacatctagggaatggggtatttgattgtggtagaaagccataggcttcactcttagaaaatccttaatttagtactctggaaaaaaacaaatcaagtataagccrtaagcaagtgaaatgccaccagaacggaagagatagagtaattaccaagttgaatcacactgatgaacaaaaggcatgttctctaggacatactacagtatttaaactgtcttcagcagtgaaaggaggaggatgaggaggacgctcatcycctgctgtcctgacagttgggtcctgcagagtaggctgttgtgtagctttctgttgtgtatcaggccagttctttgaactatgtgagttaacttggtctttagcacagtaaattggcttggcctcatttgatttaactcacaatctaaggtacaagctagaactgtcctgcctctagctgcaaaggtttttctagtccagtgctgtcttcagaagtccagtgctgtctctcctgtctcacagatacctgagaaaggtttccacctacttccagagagaagtttccaagttaaggattctgcttttggtgggggcagttcctcagcaaagttgagatctccccttaccaagtccctctctagttgtgttatattctatttctgaggtataggaaaggacctgaacttgaatcagaacttgatttgaattctgtctgctgcatagtattacatgaccttagataattattatattttagctttctgaatcccaattttcctttatgaaaaaatgtggataatagcactcccttcctatggttttatgaaaaataaaagcgttccataaagtatgaataaatatgccaatgtaaggctttctttttatttatcttgattgggattcatttagcttgctgcttcttcttcttccttcttccttcttccttcttcttcttcttccttcttctccttcttctccttcttctcctccttyttytccttcttctcctccttctccttcttccttctccttcttctttcttctttcttcttctccttctccttgttcttcttctccttctcctcctttttccttcttcttcattcttcttccttcttctccttctccttcttcttcttctccttcttccttcttcttccttcttcttctccttcttccttctccttctcctccttctcctcctcccytctccttctcctcctcccttctcctcctccttctcctcctcctccttctccttcttctccttcttccttctccttccttcttcttctccttcttccttctccttctcctccttctcctcctccccctcctcctcctccttcttcctcctcttcttcctcttctttctcttcttctcctccttcttctcctcctccttctcctcctccttctcctccttcctccttcttcttctccttctcctcctcctcctcttcctcctcctcctcctccttctcctccttctttcttctttcttttttcttcttcttttggtacagacaggctcttgctatgttgcccaggctggtcttgaactcctgggctcaagtgatcctcctgcctcagcctcctaaagtgttaggattacagctgtaagccacagtatctggcctcatttagattcttgggtatataaatttcatatgttttggaaaaattttcagccattatctctttaaatattccctctgccccactctctctctacgcctcttctgaaattctggttaaattttagaccttctcattatattaacttattttccatattttttatcttttaatcactttcacattaactggaaccccaaaggrctcagcataaggataaactagaactattaataaacctacacccccaaagcaggctgcaagaacaattaccaaagtgctgagtatgtcatggcagtagaacaaaaacacttagtatttgttgccagagttctcatcactcaggtgatccagggaacctcaaaccatgagttcagtttaaggtattccagactggcagtgcctccaagcacctggcagaaataaatgcagactttccatagaggaagacatacrcattcctcacaaataacttttcaaggaaatgagcagctcacagtaaaaaataactaaacacacaaggaaacaagcttctgttgaagcttgttctcatggttttatgagaaccatgtaaaacaactggtaacagaggagtactcacaaagatttctgaaattggaattaccacacatcatttataaarcaattaaatatactgtatttaaagaaataagagacagtactgaactatatgcatagaatagggaactatgaaaaacaaaataccagatctgaaaaaaacaatgaacttctagagttaaaaaatacaatgatcaaaattaaaaactcaataaaaggggttagcagcagattagatacaactgaagatagagttagtgaacttgaaggtaagacataagaaattatttataaaaggggttggcgaactcttttggcaaagggccaaatggtaaatattttaggatttggggccttattttttctgtcacagctactcagctttgctgttttaacatgaaagcatccatatatagtacatagatgaatgagtatggctgtatttcaataaaactttatttatggaccctgaaattttaattttatatgtattytttttagacggagtttcattcttgttgcccaggctggagtgtaatggtgcaatcttgtctcactgcaacctccgcctcccyggttcaagcgattctcctgcctcagcctcccgagtagctgggattacaggcatgtgccaccacacctggctaattttgtatatttagtagagctggggtttttccatgttggtcaggcttgtctcaagctcctgaccttgggtgatccacccgccttggcctcccaaagtgctggaattataggcgtgagccaccgtgcccggcaattttatataatttttatgtgtcataaaatatgctctttgattttttcccccatctattaaaaatgtaaaagacattcttaacttgcaggccatataaaaaaaacaggtgaaaggttggctttggcccacaagtgtagttgactcacccttaattgagaatgcaacacagctatatcttgagaattatctcctcgctccagatgttttctattcttggaaccctattgcatagaaatactcctttaaaaaaatggattctggggtaaatgtgcaggcttgttacatgggtttatggtgtgatgctgaggtttggagtacagatggtcccattacccaggtagtgagcatagtactcaacaggtagtttttcagcccactccccactcccccctctagtagtacccagtatctgttcttatttttatgtccatgtgtattcagtatttagctcccatttataagtgagaacatgtgatatttcgttttctgttctgtgttaatttgtttagggtaatgacttacagctgcatctatcaacatcatttttcatagaagtagagaaaaccattctaaaatgtatacgaaaccaaaaaagagscagaatagccaaagcaattctaagcaaaaagaacagagctggaggtatcacattactagacttcaaactctactataaggatatagtaactaaacatgatactgctacaaaaacagacacatagaccaatggaacataatagagaacccagaaataaagccacacagctacaaccatctgatcttcaacaaagcctacaaaaataagcaatagggaatggactccctattcaataaatggtgttgggataactggctaaccatatgcagaagaatgaaactgaacccctacattttaccatatataaaaattaagatggattaaagatttaaatgtaagacctcaaactataaaaatcctaacagaaaacctaggacatacccttctcatcattggctttggcaaagaatttatggctaagtcaccaaaagcaactgcaacaagaacaaaaattgacaagtgagacctaatcaaaataaagagcttttgcacagcaaaagaaactatcaacagagtacacagacagcctacagaatgggagaaatactcctaaaataccttatgtctagtgatattccaaaagcctggaaatagacattttagattttttttcttcactgtatttgtttaattatgtctttctggaatagagtggcttatattttcttttagaattccctgctgcttgtatctacatgacaaaatcacttgttagtgctgagaacattattcagaatactgatgtgcaaaaccttgtctttttactacaagatctgttgttgaagaaggcagaactttttgttggttaaaaatgtgagctatggagtcagacatggatttttgaggcccagttccacatcttactagctctaatctggagtgagttattaaactactaagtctcagttaaagtggtgacaatagtaataccaaggatgagagttagcccttatcagtgtctggtaaactagcagggatatagcccaaaaatgagacccggacttcagcttgcctcctgctccataccccagatttcatttctttactctttcatttagcagatgtttcttgagcaccagctatgtgttttctagttggaataaacggaaaattctaagacatagacacagccttataagcttgattggaaaggctatcctgcgagctgaagtcttagtgaatggggaggaagcgaatgagaacaggaagggagggtaaagggtagtattgctggatagcatgagcaacagacaagtttttggttgtttstttttttataataagcatgacatattggtgatttggaagcattaatggagtacaaaaaggataaccagggatcccaaggtccatgaagtatagatgaaagagcagcctcctttgcagagggctgtaaaaatggcgttttcccgagagacccaggtttctatgaaagcaaaaatggaaggaacaktcaccgaagagtttgaggatataaaggaacayagttttatgccacataattgaaagttagaatgtggacygtgccaggggagaagtaggaaattggaccaagaagaagcagagagcagtgacttgaggataagaaaactgagaagaatatggtttggagagaaacaggaataactagaatgtgagactggtgagttggtgacattgccagccttgtggttgcctgagaattgaccccgtcttccccaggggttgggcactcaggctgctacgtgcaggcagccacaacctgatttaakgatacctccaaggaggcacatctgctctctgaaaggggtctactgtggtctggctcaaagttgagggcctcgaaaagtctcaggggtaaaggctcttgccccgacaacaaagtggatactccctcattcagttaacagatttgttgagcaactaatatgtatcaggcaatattctgtggtctgaggatataccagtgaacaagacaatcaataaacaaaaattattataaataaagtttttaggattttggaaggtgataagtgctgtgaaagaaaatagagcaagacaagggaatgctgttgaagagattgcaagttgcaatgggacagtcaaagtagaattcattgagaaggtgacatttgaggaaagagtcaaaggaagagaggcagagcattccaggaagaaccctaaggaaatctcagtctccattataaggaatatgacacaacgagccaggaatgtgcccattagtccaggagagagatgagtcatctggattccttgaaggagccagatcctggtgtccamgtgtgactttcctgagccgacgtgggccttctgggagcagatttaattaaatggaagtttcatctatttctgctgggtgtgggcaggtgctctgtgctctgggaaagctcctgtctgctgccacagtgtggtgttttacagttgccatgtgggcaagagcatggggactttaatgctcagtctaatttcataaggaattccatgtgaagacacaaaaatatgaaaatgaaagcaaacaactcttaacccccagagccttgtgaaaaaccaggtcatttgtaatagtgtataaacatggagcagtctaaatatagcctgaggtgagtttaacacttctaaaacagcctgtcaagttccctagggctgcaaggggaaagcatttattgagcacctactatatgcccagtggtgcactaggtastttctatgttacctgttcccacaacatttgcttagataatctaatccggtatcatggctttaaatatcatctatatgctgatgactcctatatttatatcaagcccagttctctttccccacactccagactcatttacccaattgcttccttcatttggatatgtattaggcatctcacacttaacatgtccagaaccaaactccagattcacacccctgcctcccagaatcttttctaccccaggaaatggcagctaactacatccttccaattgctcacatcaaatactgtagcatcatttctttgacactcaaatctgatatcagcaaaccttattagctttaccttaatatcctcagatccagccacttctcactacctctgtatcatcactctgtccaaaccaccatctctcacctaatttttgcactcctaactagtcttccagattttatgcttgcttctctgtggtctatttccacactgaagccaaagtgatcccattaaaatacaagatagatcttgttactcctgtgatcagaactccccaatggctccccatttcttgtagaatgagagccagaacctttatagtgctcatcaaggccctacatggtccacaccttcgtttcttgttgctctccttcttgtttattgttttatcctgcgctccttgctgtgattcggatattccagacctgttcccgcctcagactcttggcatttgctcattcccttgtctggaacactcttccccagatacctgaagagattgcgcactctcttgcctttttagaacatagttcaaatgtcaccttcttaataaagtctcctttgcccatcccatttaaaatcatagccccatcccctattggcgttccctgttcccctttactgtgtcattttctccagggtatctatcactctcggatgccacatatgttttatttacttgtttattgtctgtctccatctactagagtgtttcttctgttttgttccctactattttctaacaccaaaaccagtrtctactgtattacttagtgatcaattaataaatatttgttgcatggataaatggtggacaactctgtgaagtagatggtatttaaatgcattttaacaaatgtgaaaatgatatagaagggataagtaatttgcttatgttcacagaactaaatgtgatcaagccagtctttgaacccttctctgcctggctccaaacttttttacttttctcactattcaacttagctttctgttttttccaaattcacagtcagttttatcctatgttttaactataccgaaagctttgtaagggcaagaactaggaatgttctgctcacagatatattcacaatgcctagtatagtgtttatgtgcatagtaaatattcagtaaatatttgttcaatcaatcgaggacagaaggaagagggtatgagtaagaaagaatagagccacctttaataacaaaatccagatctttcaaatattgttattagaagatttttagggagacggagtacagtggtgaggactgtcaggtggccccttcctttatctaaccctgactttccccatctcctggagagactgtcacttgaagaacttctgccaccatcwtgctgacttcagatggccagcttctctttaatgccttaaaaaaaaaaaaaagaggaaaggggtgtgtgtgtggtgggagggatactttctcttggcttctctaagcaaagctaaaaatatttcactaaagattaaaagaggacaacagagaaattaaccttgagaggacaagaaatccagaggagtagtctggtttccaaaatgcagaattctgtctcttctatagctagcacaagccagggccatacttacttcacaacaggagagcatagcattgcaggatttggctaggttctttgcttcatgacatctagcatttttcacagcccactgttcaaagactttctcctagacatcttgagctatgtgatcaagactgaaaaagccaaattcccactttgcagctcaccgaggactctctgcacggtggtttttggccttgactgcatattggaatcacctggagagcctaaaaaattactgatgcctgcatcccaccctctagagattttgaagtcactgagcgaggacrcagcctttgcattaggatttttaaagctgcccaggtgagtctaatatgcagccaaattgagaaccactgctttaataaaagattctgtttcctgtctcaggaagtctccacttccccaggtaattgataccaagaataaatctgcctgtacataggagtatgtctatgtgtgatgattcataactaagacctcactacccagagattctgatttagttggtcaggaattgggctcaggtacctttatgtttaaacattctcccagattattctaatatgtcagggtcaagaaccatgaagcaacctcaggcctgtcactatatcatatctgaatataatataacaactactgcagaatatcataacaattatgttagggtagtggaattgcggctactttcttttgattctaaatattgtttttattacacctttacaatgaaaaaatatatttggatgtttctgtaattttttcgaactttcattatgggctatagatctctagacactatttttggaaatccattttatattagtttttggttaccaattttttctctagtttttcttaatggtcttttaaaatctcagccaattgaagaacttcctatacattatattgactaatttatctcttccttatctataattgaaataaatrtatgtgtaaagatgtaagatttgtcttttctatgctgccaaactccaggagacctgagggtggaacttgagaagtctggaggaatgggcagagaccaaattatgtggggttttagagataacaaggagaaatatgggcttcatctcaagggcaaaagatgccttgaagggttttaagcagatgagtagtgacataatcagttttgacccttaggaaaatgtttttggccgcaggaaggaaatttgattagagagggacaagaatggaaggggagagggtacttaggaggctataatagaagtacagagtagaaatcaacagagaaaatcaacaaaacaaaagctggttctttgcaaatatctataaaattgataaacctagagccaaaaatagagaaagagaagatataaattactaatatcagaagtgaacatactaatccatagatattaaaaagaataatgggccgggtgaggtagttcatgcctatagtcccagcactttggaaggctgaggcaggaggatcgcttgagcccaggaacttgagaccagcctgggcaacatagggagacctcgtctcttcaaaaaaaaaaacaaaattagccggttgtgctggtaatcccgtctacttagtaggttgagatgggaggatcacttgagcccgagaggtcaaggcttcagtgagctgtgatcacaccactgcactccagcctgggcgacagagtgagaccctgtctcaaaacaaaagaaaaaggataataaaagaacattgtgaacaactctgtactcacaaatctgataacttagatgaaatggactgattccttgaaagacacaaaccacccaaactgacacaaggagaaaaagaccatctgaataaatctgtatctactaaagaaattaaatcactaattaataactttccaaagcagaaacaacagtctcagatggtttcactggtggattctatcaaaatttaagggaaaaaatgataccaaatgataccagttctctacaatgtcttccagaaaatcaaagcagaaagaacgctttctaactcattctatgcgtccaacattactctagacattaccctattacccaaataaagatattataagaaaggaaaactacggaccaatatctctcatgaacatgctccagaaatcctcaacaaaattattagcaaattgagttcagcaatgtataaaaagaattacatgttgctgccaagtgggatttattccaggtatgcaaggctggttcagcttcaaaaatcaattaatgcatattctgttacatcaacaggctaaagaagaaaaatcatataatcatatccatagatgtaaaaaaaccatttgatacaatccaatacctattcatgatttttaaaaaaactatcagcaaactatragtagaggggaacttcttcaatttgatcaaaaaacctatagctaacatcttgcttaatgagacactggattcttttcccctaagattgagataaaaccaaggatgtcccccctctcaccactcctgttcaacattatactaaagtcttcactaacacagtaagacaagaaaaggaaataaaaggcatacagattgggaagggagaaataaaactgtgttcacagatgacatgattgtctatgtagaaaatcccaaagattggcaaaaacattctggaactaataagcaattaaggcaagttttcaggctgtaaggttaatacacaaaaggcaattgcttttctatataccagcaagaagcaattggaatttaaaatttaaaacayggtgtcatttacattagtgccaaaaaaaaagggaaatacttagggataaatctgataaaatatgtgtaaatgtgtttgtgcatagatccatatatgaatgaggaaaactacaaaactctaatgaaagaaatcaaagaaatctagataaatggatattccacattttgatagaaggactcagtattgggttttgggggttttggggttttttttgaaacagggttgcccaggctggagtgtagcggtgcaaccacggctcactgctgtctcgacctcccaggctcaagtgatcctcctacctcagcctctcaagtagctgggactacaggcgtgcgctaccacacacagctaattttttttttatgttttttattttgtagagtcagggtccgctatgttgctggggctggtgtcaaactcctgggatcaagcagtcctcctgctttggcctcccaaagtgctaggattacaggtgtgagccactgtgcccagcctcagtattgttaagatgtcaattctctacttgatctataaattcaatgtaatcagaatcaaaattgcagcaagtcatttttcgaatatcaacaacttacgttaaaatttatatggaaaggcagaagacccagaatctactgatgaagaagaagaaagttggaagattgacagtacctgactccagacctacaataaagctatcaagatacaatcaagatagcgtagtattggcaaaagaatagacaaatagatcaatagaataggatagagatcccataaattgacccacacaaatatagtctgttgatctctgacaaaggaacaaaggcaattcaatggaaaaaggataattttttcaataaatgatactggaataattagatatctgtatgtacaaattaatcattcaccttgtacctttcacaaaaattaactcaaaatggaacctaaatagactaaatgcaaaacctgaaactataataaacttctggaaggtaacatagaaaatttatgtgattttgggtttggtaatgagtttttagatataaaaccaaaagcaaaattcagaaaagaaaaatcagtacgttgattttattaaactccaaaacttgtactctgtgaagttcactgttaagtgaatgaaaaaacaagccacaaactggggaaaaaattgcaaacacatacctgattaaggacttgtattcagaatatacaaagaactcttaaaactcaacattaagaaarcaaccaacccaattaaaaaaatgggcaaaagaaccaaaaagacaccctttccagatggtcaaaaaagatatgcagatggaaataagcatatgaaaagatgtttgcattatatgtcattaaggaaatgcaaattaaaacaacagtgaaatactatcacacctattagaatgactaaaaaaaaamcaaaaaacctgacagtctcaaatgctgacaaggatgtggagcagtaggaacgctcattcactgctggtgggaatggtttggccactttggagcacagtttggccactttggagcacagtttggcagcagcttacaaagtgaacataatatgttctagcagtcaccctcctaagtatttacccagtggaactgaaaacttatgtctacacaaaaaccatacatgaatatttatagcagctttattcataattgccaagaactggaagcatcaagatgtcctttagtatgtatgtggacaaactgtggcacatctagacaatggactactattcagcactaaaaagaaatgtagtctgttaaaaaaaaaaacactactaagggctttgaaatcaggaaatataaaaagtgtattttatgaaacagccacaaccaatatccaagggctttgaaatcagaaagctctatattcaaatcttcctcctgccatttcctagttgaatttctttatwtctttgttcataaaatgggaagaataatacctatcatatagggctgtttaaggattaacaataatgtaaataaaaataaaaacaaaaccccagatactgctgaataattgttagttacattcctccrctctctattattttgcttcccaaatatatcttacaaatattcttcctgtctatatccactgttaccccttcagccaggtctcctcatttctctcttggactagtgcatgtcattcatctgcataaaaatccttcagtggctccccattgcctccatcagcaagtccaggctccttgtcctagcagcaagaccatgctgtggtctcacaggctttgttctgtcagtactactgtatttgcaattcccaatatgtgccaggctctttttctgctttggacccttgcacatattgtatcctcggctgagaatgcccttctcctttctctcttttcttgacagtacctcctcaagatacccaccctaattcccaagaccactttaaattgtctgcctcctccataccttgtatataatagtggtcgtacttatacccaaaggtaatcttttatttacttacctatttgcttactgaaattcaagctttttgagagtaggaaccaaaatggaaaacttaggttccttagtgcagtgcttctgaaacatttcctccagaggacccttagtggtagaggagagtgagcatatattgcaaagcaacccactgcaagcataaaaattccttttttttttttttttttttttttttttttgagacagggtcttgctttgtcgcccaggctggagttcagtagtgcaatctcagcttactgcagcctcagctcaagcaatcctcccaacctcagcctccccggcccaagcaatccttacaacctcagcctcctgaggagctgggactgtaggcacatgccaccatgcccagctaattaaaaaaaattttttttaaatagagataaggtctccctatgttgcctctggtctcaaactcctgggctctagtgaatcttcccaccttgacttcccaaagtgctgggattacagatgtgagccaccacacctggccccccaaaaaagaatctttaagatctttcattttgcttgtaaaaattctgcattctataccatagtatgtatgtgttttcttaatacattcttcctcatatcttcaagtacatgtattgctccaggaagatacactggtttgtactgtggctttgaataactctaacctctattacatagcccctgaactgtgacacctgctttgagagcctggacttagtggatttagggacaatgttatctggaaatcatgatagtgacctctatcttatactggggacctatagaagaattgaacagaggatttgactgtgattttaactacaaattttatgagatatagcccttccactgggctcacataagtgctaggatgctagtttataacaagttcctgcacatagatgatggaattgttttagtggccctccstttctgtcccctgaagtctcttgacctccctgcccaataggcatacatttatggacagccagttgaatgagagagaagaatccaaataagaaaaataaatgagcagttattttccttcttaaattattgaaactatgataataattcagatgaatctagaaggaatagtaaaagcagaagtcaaacattaaaacagtaggaacagtgactaatatttgtataacctttcaaagggcactgtgacccacattgctgtaggtattcactgatcttcccatcagccctataaaatgtgcattactatagctattttaagagttaaggaaaccagttgtgtcttacctgaggttgcacacctagtaagtagaactggtggcttaaactccaatcttcttaccttaagctgattacactttacatcatagaaagtaggggctttgggaagaacaggagagagttttggagtcagttttctcttgtcaaaaatgaaaataatacttaccttagagtaggactgctccaaaggtagacagggccctggccaaataacgttttgcaaggcctctgcctgtataaaccagttgatgggtccatgtatgatatattgacttactaaggatttagaacaatgggtagagaagagatacttatgtatttgttatccaatcagtgcatatgaaaattccttttgctacccagacaccaccaactctttctgttcaggttcaggaaccatctctgtgttttctattgtcaaatgtatcattgctggaaagtttcatatctcctgccacaaacaacaagtatctgtattattagtactcaatgccatggctttttggaaactgttttgtggaaacagtgatcttctcccttcatttctccagtaccattcagctcatgctggatacatcatttcatgaggctgcgctatccttcctgagacctgggagtatctcaaagatgggactgctttgttggtcatgaacacacaccagtgtcagagagtgcagggaaagtgtaaatggtaatttgttttctggtcatattaaatgtatcatttgacattttatagtgtaaacagaacagtgcatcttctaaccatggcttctcctggactccttcagccccatmtgcctgggtctaagggaggtactactttgtagaggattgttgtaaagctgaattagatcattagatccgctgtctggtgcctggtttgtgctcagtgaaygttacttctcttgtgtctttcactaccacccagaaagaggatgtgtttttatttttaaggaaataaagtgtggaagcaaaattgaattggagagtcacagcagatctctggtggagtgcctccgtgaaaattgtctgttgaagcacttggagaacttagtggggagcatccctccagctaagaggaaataaattacaaggctctggagacaaatgtaacctggagttaatgtcagctccasaatcactgatcaaataggaaggtggcctggtttgatgaaaaggtattgcagtgcctagcagcaagagcagaaaggcagggcctccggagctgagaaataccacaagtttcagatggctcagatcaagcagtcccttttttcttaaagtgatagaagacatttgacagtgcttcagcatttgtcgtagatggctgtacacgtatcatgatggcaaaagctgtagagaaacctgagtctacattggaagccacaaagagcaaagagtcagtgatgtctagggtagaatggattggcacagcccacatgtgggtagatgatgaaactggtgacaatgcaagcaagacccagcagaccttggagtaacaggtcagacaggtggcagtcagaggagacagaagttgtccttaaggagaaacatttccatcttggggcttgagaggatctatggcagtaaaggctatttcaaaaaaaaaattaaagtgaaaatatttaatgacagaataggattactcaagctaggcgaagctgcttctgccatttccctcctcatgtcattatcccagaaacaactctctagtacttggagaaaggcatcctcatgaggaaggtagaagatggaattgaagaattccctcctctgtggatggaamgagctctgtgtagagaggctcatctgcacgctcatgcatgtccccctagcatggtaacactggctttgattaagctgctgggttgttaggcagtgtgctaagtgctgcctacatggtcttcttttctcataaggaatgctttaaactaaattagcacatgaaacgagggagcaggcatggtaggggctgatctgagtccagtcctctctgagatggttctagaaactagactgatggttacacaatgtccatcactgatctgtagagtcctcaggaatcactgtcaatgactcttccccagtttccctggccatcaccccacttcccccttacacttcctgttgattaaccttccaaggcaaggtaaccaactgatttcagtccagcattttattgggtacttgtatattctgtgccatacatgctttgctaaaatgatcatattctatgagagaaagatatttaaatggacaattactcttcagtgtaatggagtgtaatgctaggccttaactatgtcctagtcatcattgtatccttaatcccaggccagttagttagcatgtactgagcaccagcgaggggccagacaccgtactcagtgccagcccttctttctcagcataactcttaacaaaaaaattttataaagtaagtactagtataatcccacttttaaagatgtgcaaattaagggcacaaaacaatttaaaagacatgccccaaatcacacagctattaagagagccaggataaaaatccaagcagagtgactctattgtctctaaatatttgttgcctgtggaaatgagaggcagaaaggggaaggcggtaggagaatgggggaacaagtgagcaagtgaagatgaaggtctgccctaggtggcgcaggtccacagggggatgggttctacctgagaagggaagtatcatggaaagttcgcaagggaagtggtgcttagaaaataggcatccctggccaaggcgggctaagggagcagagctaaggccagcccttccagttttgcgctagatcctttccccctccgccttctcacaggcattctcccccaacctggccaacatggtgaaaccttgtctctactaaaaatgcaaaaattagccgggcgyggtggcaggcgcctgtaacctcagcttctcgggaggctgaggcaggagaatcacttggacctcggaggtggaggttgcagtgagccgagatcatgccaccacactccagcctgggcaacagagtgagaccccgtctcagaaaacaaacacaacaaaaagaaacattctccctacaactgtcctatctctactgcattgtgagtttttcttttattctaaccagcttgtaaacttggggaaatatttcctaacctcaaaaaacactttaccctgcttccccgctccggctattgccccatttctttgttcctttgtagcagaactcctaaaaatagtctgtgtttcatgacttcagtttgtctcttcctgttttctcttaaacccagtgaaacgagtttcacctccacattccagtggaatggctgttgttgaggttggtggtgacctccctgttgccgaatccagcatttagtcctgtggccacaccttactggacctccacagtgtgtgacgcagttggtctctgcgtccttcctaagacacttcgttgaccrcagcctcacactctcctgctctttcagcctcctgcagtgctactcctcatctcccaaatgctgatccttcagacacacgtcagccagggcaccctcccactagatatcatgtggtgactctccctgtggttggatctgaacccgagccaggcgcttatggcagccacgcgtgtcacacagcatgtgtgtcccctccaaatgtgctccctcaccacatcctgatgcgattcttggaattacatggtttccactgcacatggggaagttgaaaatcagmttttccatcacttgcttgtcagtgtcctctgtgacagtttctgattccagatctgatgctttttccatttatgacccattgcttggcctgattccttaaactcagtccttctgagtgaagcaggagagtggaagcgtctggttccttctttggggctccagcctgtccatctggatttcctcttgtgagtgcagtggtaacactcttcaccccaggggcttggtagtcacgtttgcaggacaatgggtgctcttactgggtttaatgctaaatctcccaaaatgaaaggccagctgcagagtaggagaagaacaagggctgagtgatttgatcagacatctgtgggggcctgctggcatttggagtgtgagtgccttagagagactgactattctggccccagggagttggcgaccgttaatcttggtggttttgaccgctaactgccccagaggtcccagcctgctggatgactcagaatccccaacactccccctattcttctctcactgggatagtcaggaggccatttctaaggcattttaatttggtaataacttgacatgacccactgtacccagagttgtacgttttaggagttactgtcgctttctaaatgaggggttgatttggagcccatcatccttgatattggactgccttccactgccatggagagagcagtatctcctgccttgcctgctgggctccagctccctctccattgtagatgacgtgatcctgtgccccctggactgtcccacagcccttattctttaagtaccttgccaaaagttgatggggtaaactagagagaaaagaggtggccaaaggtctgtctgttgttcatttatttctgcactgcactgtgttaagaagggcacctgctgtccatctttctgctgtttatgaaactttctggaattcagaaagaccacaggaactcacagcacaaggcaggcaagcagatggtggggactggggacaggacatgaagagactcaaaatgccttactgccgcagaccaaagctgtgtgaggccttctggactgtcttctccaccccgtgtctgactgtgttgaccactcctgtgctgtcctgtgccttcctccgtgaccgtgttggtggcagtgccctgttaagagttcctccactggtgttagagaccttgggttctaatccagtgtctaccacttgtatgatcttggattagtctcttcatctttctaggccttgtgtgtaaattaattcatagcaccaactcacagagttgttgagagagctaactgaaaacatctagaacgtttttgtcactgtgcctagtcaaaaagcttctagtcagttctgtaattgcactgaggtttatatttcatttcaaaaatacagttgtttacataagaaaatattgtttttctcttgttagacttttggctttcttttgcctaccaaataaagtcccaactccttggcttgtcactcagccttcagatttgcatttcaggctttgaatttccgtggtgggggatgcttgaaaatgtagatttctaaaagaaattgtgcattgatcagatgagtttgtgttcaatgagcagttactctgtgtaaggctctgggctaggcccgaggggtctgtggtgaatcagacatgacacacactaggcagtggcatcatcatttctggtaccaccaccccacacccacccagtccagaccctgcagaaggcagcctggagggtaggcttgccacagggccccagcacagtagagcagctgggcaccagagttttggcagcaggcccaagggtgggggtggaggaggtggggactcagaactggcagccagccagggctcactcaggtgccccagcatgcagggcctccagccccggcagtcacggagcccattcactgactatatcctgttctttggctgtgatcttctctagactgcatagtgcagagattttggtggcagggcagtgactccagacccacattgaacgcataagacgttgaaacccaaagatgtgaggtggcatgattatggtcacacagcaacaggccaggattagaacacaagtcttctgaaaaatatgtagcagtctcagccttgtgggttcctgagattgccttgtctgccgtgagactgtcagggtcattttgttccttaagaaagttttaggggtcttctttgtgcccatttatgcaaggcactggagagggtaggcagggttaaatcagcctctgaccttaggaatttacagtgtatcaagggagacatactaccaaaaattacaatacagaatagcaagtgctgggggtaagtatatgatgtgaggggaagggggagtgactatacaagcacagaggaggcacttagcccaatccgagggtcagggaatcactcccagtgaagctgatatttaagcttaatcatgaaggaccaatagttgttagccagatgaagaaggacaaggaataacattccaggcagagagaccaggaaaccatcctcaactaaaagtctaatggttatgtcagtagccccagtgacataatttatcgtgtctatattcggtcactgttcgggacagttcccactactggggaatggttcccactggatggatcatagcctgagtggagagaataaaagcagatgaggctggccatgtaggaacatacaaggaaggtggaaaggccaggggctctgagtatcaaagcctgagtagctgtattctrtgaactccaagcaccactcccccgggtattggagccttgatagagctcctcgtttccttggtwtcaggcttcctgcaaagaattatgagtttgagctgggcacagtggctcaatgcctgtaatcccaacactttgggaggccaaggcgagaggatcgcttgaactcaggagtttaagacctgcctgggcaacataatgaaaccctgtctcttaaaaagaaatctgtgagaatccagttaagttccttttacagataccatccaggggcctgacttatttatctatctattcctttagggttggggatttgttttgtttttacccttaaagccttaatgtggaaaagtgcctgaagtgctgattgtagggaatgaaacttgattcaaggtttaaacaccttatcccagccactcgggaggctgaggcaggagaatggcgtgaacccgggaggcggagcttgcagtgagccgagattgcgccactgcactccagcctgggcaacagaacgagactccgtctcaaaaaaaaaaaaaaaaaaaaaaaaagggttaaacacctacagctccttatgaattaataacccactcagtgctcagtgcctggcaagctgtaactttccttctcttcccataggcctgctgaattagccaccaagtacgcaaacttttcagagggagcttgcaagcctggctatgcttcagccttgatgacggccatcttcccccggtaagtgctcctgtttccctccactgcctagacagcctggtctggggtccaagagccagaaactctgcctctcacagccagtcatgttctcctatgctctggaaaccatgggttcctggaaaggactctgcctttaagttggttcctactccagtcctactccatgccgttgctttgccttactcccatcctgcctctggagcttgcaccttgtggcacagcctgtttctgcagaaggataacctacatggttgccgcatgcaagccaggtatccagaggcagccagagaaggctgccaagcacagaagctcctagacctagtatcagtggccaaagaaacttttttggaagcttggaccaactagctggcttcagggaggcatatccaaataaagcagggaacaaagagaaatttctgaggctgtcttgagttttagcactttccttctctgtccattttgcattctggagctgctgacttctttggcacctgaaagaatctgtgcataacccagggagttccttttaccgaatgctgctaaggggtcttgcttactgatccaccttctcctttttggttttcttttctgaagccttggtgtggaaaaggagctgaagtgctgagattgtctttggagtgcagtgagactgtcagggtcatttcgttccttctgatttggaggggctgaaggaaaggctgcctaggattgtctgggcacttggaccaccagaggagtgctaggggtgggctctgctcactgggggaaggacttgcctcccatcccttagaaggctgaggttaggacacgtaatgtgcttgcaaaggaatgctgagaaacagctcgccccaaagtgactccggtatatttggtttttatgctccctttcttttctaacgtgagcagtctcagcttagctccttgtgtaaagcaagggctatgctggctgagtatctggtgctcagatagagatctctttgtccagggtctgccttctgaattgattccaaatattttgcttcctccagctatttattgagtgcccctgtgtctggctttttgtgttctgtattcttaacacaggtttttgcaagcctatacgactcagtccttagcccagacacttgtgagttttcctttaccagtatataggtttcgtttgctttttctaattgaaagtaatacaggcatgtggaaacaaaacaaaacaaaaaaacctcaaacagtacaaaaggttatatactgccactccagactccttccccagagacagccaatattaccaaaagtgggaacataactgtatttaatattctgtactgtgtattaggccgttcttgcatgtctatgaaaaaacatctgagactgggcaaattgtaaagaaaagaggtttaattggcttatggttcatcaggctttacaggaagtatggtgctggcacctgcttcacttctaggaaggcctcaggaaacttaaaatcatgccagaaagcaaagggggagcaggcacgtcatatggcaaaagcaggagcaagtgagtgaaggagagagaaagagaggaagtgctacgcacttttaaacaaccagatctcacaagaattcactcattttcacaagaacagcaccagggggatggtgctaagtcattcatgagagaccaccgccatgatccagtcacctaccaccaggccccattggagattacatttttttcccttccttttttttttttttttgagacagggtcttgcggtgttgcccaggctggagtgcagtggtgcgatcttggctcactgcagccttgacctccgggctcaagcaattagccacctcagcctcccaagtagttgggactccaggcgcatgcaaccacacgtggctaatttttgtatttctggtagaggtggggttttgccatgttgcccaggctggtctcaaattcctgggctcaagcgatccacccaccttggcctcccaaagtgctgggattacaagtttgagccactgagcctgtctggggattacctttcaacatcagatttgggcagggacaaatattcaaactgtatcattttgtccctggcctccacaaatcttatgtccttctcacatttcaacatacagtcatcccttctcartagtccctgcgaaatcttaactcattctagcattaactcaaaagtcctactgtggtcctgtgatctcgccctgcttccacttgccttgtgatattctattaccctgttaagtacctgatgtctgtcacccacacctatttgcacactccctccccttttgaaaatccctaataaaaacttgctggtttttgtggcttgtggggcatcacggatcctaccaacgtgtgatgtctcccccggatgcccagctttaaaatttctctcttttgtactccgtccctttatttctcaagctggccgaygcttaggaaaaatagaaaagaacctacgtgattatcagggcaggtcccctgatactaagtcccaaatctaaattcttatctggaaatgagttcctttcacctatgagactgtaaaatcaaaacaagttgcttacttycgagatacaatgggggtataggcattgggtaaacatcccattccaaaaaggggtaatcagccataagaaaggggctatacgccccatgcaagtttgaaacccagcaaggcagtcattaaatcttaaagctccaaaattatctcttttgactctgtgccccacattcagggcacactggtgcaagaagtgggcccccaagatcttgggcagctccgcccctgtggctttgcagggtgcagcccctgtggctgctctcatgggctggcgttgagtgcctgaggctttttcaggtgcagggtgtaaactgctggtggatctaccattctggggactagaggatggtggcccccttctcacagctccacaaggcagtgtcccagtggggaccctgtgtgaaggctccaatcccatgtttcccctccacactgccctagtagaggttttctgtgagggctccactcctgcagcaggcttttgcttgggaagccaagcttttccatacatcctctgaaatctaggtggaagcatccaagaatcctccattcttgcactctgtgcactcttaataccacatggaagctgtcaaagtttacagcttgcattcttcaaagtggcagcctgagctgtaccttgccctttttgagacatggctagagctggagccgccagaatgtggggagcagtgtcctgaagttgcataggggtgaggccctgggcctgacccatgaaaccatttttgtctcctgggcctcaggaactatgatggaaggggctacctcaataatctctaaaatgcctttgaggctttttccctattgtcttagatattagcatttggctcttttttagttatgcaaatgtctctagcaagtggttactccacagcctgcttgaattcctcttctgaaaaagctttttctttctttgccatgtggcttggctgcaaattttcccaatttttatgctctgcttcccttttaaatataaattccaactttaagtcatttacttgcacctgtatctgagtgtaagctgttaggagcagccagtcatatcttgaatgctttgctgcttagaaatttcttctgccaaatatgcaatcatcactctcaacttcaaacttccacagattccttgggaaagggcacaatgcaaccaagctgtttgctaaggcataacatgttatgacctttgctccatttcccaatgagttcctcatttcaatctgagaccttgttggcctagatttcattggccatatccctatcaacattttggttacaaccatttaaccagtctctaagaagttccaaacttgctctcatcttcctgtcttcttgtgagccctccaaactcttccaacctctatccattacccggttccgaagtcacttccacatttttagatatctttctaacaataccctactcctggtaccaattttatgtattaggccattcttgcattgctacaaaaaaaaaatctgagctctccatttgccttctgccatgattgtaagctttctgatgcctccctaggaggtaagcagatgccagcaccactcttcctgcagaactgtgagccaattaaacctcttttctttataatttacccagtctcagatattttttttagaggccgggcatggtggctcacacctgtaatcccagcactttgggaggatgaggcgggcggatcacgaggtcaggggatcaagaccatcctggctgacatggtgaaaccccgtctctactaaaaatacaaaaaattagctgggcgtggtggtgtacacctgtagtcccatctacttgggaggctgaggcaggagaatcgctttaacttgggaggcgaaggttgtaatgagccgagatcacgccactgcactctacacaaagcaagactccatctcaaaaaaaaaaaaaaaaaaaagtttacattcactttttgcacatggatgttcagttgttccagaaccatttgttaaagactctgctttctccattgaattaccttggcatgtttgttgaaaatcagttgaacatgtatgtgtaggtctccttctggactccctagtctattctgttgatttatgactttgtgccagtaccattcatacatggacagtcttgtcgtctgttactaaagacagttttatttcttcctttttcatctatatgtctcattcctttttcttgccttactgcattggctagactgttcagtgcagtattaaataggtgaggtgagagtgaacagccttgcctgttcccagtcttaggaggaaaagatctagtctttcaccattrtggtgttagctgtaggtttttcatagataccattttttaggtagaggaagttctcttctgttcctagtttcttgagagtgtttatcatgaatagatgttgaattttgtcaaatgctttttctgcatattttgagaagatcatatggcttttcttttttagtctattaatatgatgaattacattgattggttttttctcattaattgatttttgaatgttgaaccaatctttcatttgtaggataaacttcatttggtcttggtgtattgttctttttacacattgctctattcaattggctaaaatttttcaaggatttttgtgtctttggtcatgaaagatactggtctgtagttttcttgtgatgtctttagttttggtaatatagtaatgctggcttcagaataagtgggaaaatatttcttcatctttctacaaattttgtgtacaattggtaatattttttatgaaatgtttgatagaattcaccagcaaaatctaggcttgtctgaagaaaagacagttttttatctctattctcatgcgccactgaacacacttctgacaccagatgtgtggcagtttttctcacacatcaagcaattcttcagcagacactaatgggtgtcctataattcaattcaattctggcattatccacctggagatggcgtcagatcccacaggttgacggccgaacaagactatacctcacttcagatgctaatcacaagtagtaggttgttacctatacatctcgccaaccagctataagttgtgaattccaagaccatcccctcttgggtttgatctgtttgctagagcagctcacagaattcagggaaacttatgtttatccatttattataaaggatatcataaaggatacggatgaacagccagttggaagagatgcatagggcatggcatgtggtaagtggttcacaagtctgaaagctctctgaaccttgtccttttgggtttttatggaggcttctataaaccctgtggaggattacataggcatgattcattgcatcattgaccactggtgatcaaatcaaccttcagcccttttcccatccccgaggtcagagggtgagactgaaagttccagccctctaattgcatagttggttcccctgccaaccagcacccaacataaggctatccagaagtcatctcatgagaacaaaagatattcctatcacccaggaaatttgaaggaatttagcagctctctgtcagatgtgctcttatcagtcaggaaattacaaaggtcttaagagctctgggtcagaaactagggtcagagactagactaactattggtggccgggcacggtggcttacgcctgtaatcgcagcactttgggaggccgaggagggtggatcatgaggtcaggagatcaagaccattctggctaacacggtgaaaccccgtctctaccaaaaataaaaaaaaattagccgggcgtggtggcgggcactacggtggcgggcgcctgtagtcccagctactctggaggctgaggcaggagaatggcgtgaacccgggaggcagagcttgcagtgagccaagatcgtgccactgcactccagcctgggcgacatagcaagactccgtctaaaaaaaaaaaaaaagactagatattagaacaaaagattctcttagtgcccctatctgtaaggatttttaggagctttatgtagggaccaggagcagagaccaatatttgtattttttattatttcatagcctgcacatctttgtaggaaggcttttgttgttgtttttggtttctttttgagacatagtttctgtcacttaggctggagtacagtggtgcaatctcagctcactgcaacctccgcttcctgggttcaagcaattcttgtgcctcagcctcccgagtagctggattacaggtgtgcaccaccatgcccaacaaatttttgtatttttagtagagatggtgtttcgccatgtttgccaggctggtctcaaactcctggcctccagtgatctactggcctcagcttcccaaagtgctggaattacagatgtgagccactgtgcctagccagggaagtttttttttattattattattacaaattaaatttctttaattctagagttattcaagtttttctgtttcttctttagtagcatgtctttcaaggaagttttgcctttcttctaagttgttgaatttattagcataaaattgtgtataatattcccttattattattttaatgtctaggatagagacagagtcctctctttcatgcctgatattcgtaatttgcattttttctctctttttcttaaattcatctgatttgaggtttatcattttttgttgatcctctcaaataactagcttttagttccattggttcttgtctattgatattttttccactatatcattgatttctgtgcctatcttcattttttattttttcacttttctcttagttggactttaatttattatttgtttttttttccttaggctagaaggttagatcattgattttatttatttctcatataaacattgtaatggtataaatttcactctatatattgcattgactacatcttacaaattttgatatgttgtatttttatctttgttgagttaaaaatattatctaactttactcgtgatttctacttcggcctattagttctttggaagtgtttttgcttaatttcctaatatttgtgggtgttccagatatctttgtgttatagatttctgatttatttttgctgtgctccaaatatacgttatatgattttaatacttttaaattaattgaaatctgagttatgggacaaaatatggtcgattttggtgaatattctgtgtgtgcttgaaaagaaaatacttctgttttagggtattctataaatggcaattagcttaggttggtttatggtatgtgtctagtttcctgtatccttactgactttctgtacactttttctaacaattactgacagaggggtaatgaagtcttaatttatcagtttttatttcatttgttttgaagctctgtcatttggtgtgtatacacttaggattgttgtatcccatttctaatagattccttcattattttgaaatgtccctttttcttattgatagtcaaataattattgttccaaaatcttccttgtctgatattaataaaccactctggcctttataaaaataagctrtatcatggtgtatgttttccatccttttatttggttggtgcaaaagtaattggggtttttgcaattacttttgtttgtgggaaggagcatgtttatatttgcccttgagctgtcccacgggtggttggggagcagcctatctttttaacctgtttgtgtcaggcagtcctcccacctcagcctctcaagtagctgggaccacaaacacatgtcaccgtacccagctaatttttgtattttttgtagagacaagactttgccatgttgcctaggctggtctcaaattcctgtgctcaagcaatctgcctgcctcagcctcccaaagtgctgggattacaggcatgagccaccgtgctcagcttatttatttttgtttgaaatagtcaattatttaaaataatttaaaaatgagagtggaaggcaacctacagaatgggagaaaatatttgcaaatcatatatctgataagaggttaatgttgtccagaaaatatagagaacttctaatactcaacaacaagaaaaaaactgatttaaaagcgggtagagaacttgaatagacacttctccaaagaagatatacaaatggccaaaaagcacataaaaatgtgctcaatgttactaatcactagggaaatgcaagtcaaaaccacagtaagataccacctcacatccattaggatactatggctattatcccaaaaccagaaaataacaagtgctggcaagcatgtagagaaattagaatccttgtgcactctgtgggaatgtaaaatgtacaacaactttggaaaacaggatgcagttcctaaaaacattgaaaataggattgccgtatgatccagcaattccacttctgggtatatacccaaaataactgaaagcagggctccaaagggtgtttgtagcaggaattattcattattgccaaaaagtagaagcaacctgtgttcattgacagatgaaaggataaacaaaatgtggtatgcataagcagtggaatgttactcagcctgaaaatggaaggaaattctgacacatattacaacatgaatgaacctcgaggacattatgctaaatgaaatgagccagttacacaaaaacaaatattgtgtgattccattcatatgaggtgcctagagaaatcaaattcatagagacagaaagtagaatatggtttccatgtgctgggaggagggaggaatggagagttattgtttaatgcatatagagtttcagttttgcaagatgaaaaacagctctggatattggttacacaacagtgtgaaaataactaatactactgaattgtacacttaaaaatggttaggatggtacattttatgttagtgtattttactacaattcaaacattttaaaagtttttttaatgagagggaaaattcttttatatttactcacaaagttttctttactgttggtctttcttcctttgtgtaaatacgtatttccatatggtatcctctttcttctgcctgaagaacttcatttaacatttcttgtggggcaggtccgatgactgcgaagtctttcagtgttggattgtctgaacaagtctttattttaccttcaattttgaaagatttttaaaaatgttttggctaggtatacacttctaggttgacagtaccctgttctcacttccaccacccctcccccactaccttaaatatgtaactctatttacttgcttcattcctgacaaaacgtcttctgtcattcttacctatattcctttgtatgtagtatttcattttcttctggctgcctgttgagatttttctctttaccagtggtttccagcaattttattatggtgtcccttgttgtggttttctttttttttttttttttttttttggcgtagggatggagttttgctcttgttgcccaggctggagtgcaatggcgcgatcttggttcactgcaacctccgcctcctgggttcaagcaattctcctacctcagcctcccgagtagctgggattacaagcatgcgccaccacacctggctaattttgtatttttagtagagacggggtttcaccatgttagccaggctggtctcaaactcctgacctcaggtgatccacatgcctcggcctcccaaagtgctaggattacaggtgtgagccacygtgcctggctgtggttttctttatatttatttggcttggagtttatttaactcctcagatctgtaggttcatagttttcttgtttgtttgttttgttttattctttgtaatcacatttggaccttgtttacatattttctcaaatattttttctgcctcatctcctttcccaggattcaaattacatggatgctatattatttgtcccacaggtcactgatgctctgggtttttgtttttcaatcttctttctctctctgcttcattttggatagtttatattgctrtgtcttcacatttatagctttttcttttgtagcatttaatcacttgttaatcccaccatgtatattattatgtcaaatactgtgtttttaatctctgtaggttccatttaggtcttcttatatcttctgtttcatttcttattatgtttgtgttttcttctgccttcttgaacattttgagagttattggcaaattgcccttcatagcagttttgggatttatgtacccacatagtagttgatgatggtgccatcctttgttttcttctgttttacagttttgttatttatatttaaattattaattcatctatttttggttttgtgtgttaggaatgaggttgagatctagggttcttttttttttttcatatgggtagctagtatttcttggtattttgatcacaaaatacttaagtaaattcaaggttttgatttctgcagcatcaatattttgacagaaaaggacttgataaagctctttttgatgtgttaattttgagatgatctacaaaaactattaaatcttaccttttttaactttttaagaaattagtttsagttcaaatatttttgaaatataaaaattgtatttttaaagctataattcttatagacattcagtrgttaaaaatttgattgtgcttattaaaaatggtcgtatatgttttgcacttcagctatgtgaaaataaagtttctttgggaaggtgacatttggtttcctgattatgggagggagttggttatctcaggtggagcaggaaagcctggttgattctcacaccagtatgggactgggatttcccaggatggagggaggagaccctttctacaccatactttgaactactgacagcaaaaccctcccaccatactgagtgcaccttgtgtacacttggctaatgtacacttctgatttacagcacacagcagaagcttcagaggcgaattcagctcccctttggcatgctgctgggtaacaagatagtaagagtggcagtgtgtacaagctgtggacaggagcatttcctctctgctgcagcaaggcaaaggaaagcctagggagagtaaaacactagaatctttctaatagctctgccctaccccatggtctaaatgattatggccaagtggctacacagtatttttatttttctagaataattatatccagctgtgagaaagccaggttcaaattaaaaacctgtaataacctgtcccagaattaataacaatgaaacttaaacaaattttgatttgtgaagaaaacatgaaaaaagtccaaaagaaaacccctcaaaggaaacaagtgtcagtgggtcccttgtggggcagcttgtacatctctcaaggggatcctccagcaggtagcttcctctgtggcaccaggtgcatccagggtgggccggctcctttagaagtcaggcaggccaggcagagggaagagagtgaagctctcaacctcctcctggagagcctgcacacacccctggtatttatgccctgctagtctctccttgaactctttcagggtggctctgatgccagcgttgctctggatctgcagggttagctctatccctctgtggataaagtgggctaccttttggaagcctttttccaaaagtccaagagatgtcagtgctgggttccccagccgcagtccactgggccgtagagtgtttctatcatctgggcaggtgttcttgttgcaggcaatagaacaggcttctaggaccttctcagcccttctgccatctgtgcctttgattgaatggagatccacgaggatcaaatgtttatcagaacaacctgtgactgtttggtagccsagctccgtcagtgcctcagacagagctctgcagttggccaccacatggtgctgataaacttcaaattccagagtcatagcttgcttcagggccacagcaaccccagcaatggtgtggttgtggggacctccctgaaggccagggaacacagcagagttgatgagagactccaggttgtacagaatctctttgccagtcttgggatccatactttgccctcctttcctgtagaagatcgtgcggacttggcagcctctcaggttcttgtgagtgktggtggcagtgttcaaatggggagggcaccacgccagctgccaccagcctgctgatatgtgccatgtccaccatgagatacaccccattctcatctgcagtttttctgcagcggggcatagtccaggttttaggaggagcagctggttcctgcactgatcagcttcgggtggaagaggcgggtgttctcctccagctggtcatagttgatgtagccagtgtctgggttcaccttatagggcatagattcaaagaagatggacgtggcagagattttcttcttgtctgtcatgaacccgtgggtcaggtgacccccatctggcaggtccaggcccatgatgcacccatgggtttccaccagggcagttacactcaaagtttgcaggggagcctgagcaaggctggacgttgaccccccagcactgtgggtccagcttataggcctgcagggctcgcttctgacagagggtctccagctcatgagtaaagtcagtcctgccttagtatctctggcccgggtacccctcagagtatttgttatttaagcaagagcctagggcctccaaaactgcccagctggcgaaattctccgaggtaatcagctccaatccagccctctgcyggtactctccttaatgatgttgtaaacctcaacatcgctgtctttgaggggctgcgccagcatcttgtcatgtgaggaccrcaggtcagcatccttgtgggccctgttgactggcattgctattgcatgggtccgaagctgccggaacacagccccgcacatgtgcctagcctcagtcccacgccgccaccagtgccaccagmgtcccagacccgctgacccaatgccctgtacactgccacgcaccagcaacgtgactggcygcaccaaccccaaatcccaaacttggtgcgggactgctagtgctctgctaggtgcaccccttgcaccaggcttaggcttggcctaaatcttacctttttaaaaaaaatccccaaatgctgtgtgaagcatacattctcttttcctatgcttcactcttccctgagcccacctagtcattgactcccatccctaggtgcagactaaggagcaggcagtgtaaaggaaggggtgctgatgtgcccacccgtccagaccagagtcctgcttctctgggaagccagcctgtttgctstcacacttttgtactctctgctgggaagtcctcctttcctccctcgagtattgctcacttggatacatcttcctctaattagagagatggggaggggatggcagtaggtccaaaggaactcagatttactgagcacttgttttgctctaaattttgagttaggtcttttgaatctgtttggtctcatggaatgcaaagtcttcccttacctagaaatacactccattactctttcccctaccctgtgcaccaccacagtgcctcacacatagctttgttattgtgtatataactattggctggtatttcttctcccatagagactgtgaacttctcacatagaggcatggtctattcatggctgccaacacctagcagagcctttagcacacagtagacacttggtattggttttgtgagtggaaattaatttctgccctccagagaytgagagtgtaaggatgtgggaaatgttgataagacactcttttagtggaaagagtttctgaagaaaactaattattgtgacatattccaatatatgatagattgaaaggagatgaagatttggagactgaaagttctcacagctttctcacttcacaggctatgtgatcttggaaaagtctgagccttatttcactyattagtcaagagaatgaaatgaaaggatgtgtcctggggccataaatgttagatcatttcaacaacatttaatgttagacacttaattaagtgaattctgttttctcagtgactttcattataattagataagtttttttcaggaagaaaaataaagatcctagagtaagtcacagtaaacattttgaatgttttctttaaaaagaaaaaatataactcgtaaaacctaaattgacacataattggcataccccattttcctgccaatattttgcctcatacatttgaatggctttttgtgctttggtgaaagacatgattgagtgttgtctcttttagttggtggccagtagggccactcggtattgggagaaagtgaggcacctacaggctaaacctgtggccaaacagtttcagcagaaagcagagccctaatccaagccacgtccatgctgcagagtgatactagcagcagtgacagtgatagctcacacctactgatgtttactttggatcaggtcccrtgctgagattttttcatattttttctgttttaattctcccaacaatcatataatgagactaacccttgttagtccagttctaaatatgaggaaataaaggcatagagaagtcaagcagtttgcccgaggtcacacagataggaagtgataaaactaggttttgaacccaagtccacatatttaacaaccgccttctacttcctctcacagctgctgtttcatgggcaggctggctagtggccaaggtaccgaggtctaccaratgcctggtggtagctaatgaggtgctgatgtagaaatggttctcttacccagctctacagaggaaaaccacacctctcttgagatgcattttgttttaggaargctggggtgtgtggtgtgtatctgtgactgtgcgtctgtgattcacatactgctaaggaatcattgctatggtccaagctggctgagtttccagagtgcaaagatggcccttgaaactttgcagagctctctgaggcaggaagtctagagagttaacacacagtcccagctgcctgatttgggacgcttgcatgagaaggtacaggagacctattgcactgccctggggactttaaaagcttgtgggctcctggccaggatagctgagtatctggtatccccacattacaaagcccctctctctctgcccttccagaaaaagatcctgggattgttatcactacaacaccagggaggggtagtaagattgagaggcgtccttgccaaattttgtcccataccataaattatggagaagaatggaataccatctacttctctacttctgcagaatcgttgtccttctaggctgggagcacattgggcacccccatacccctaccaggaatatgcaagacttgctacagttaccttctccgcttcctcatgtccctctatgtagtctggcctccactctcgcttctctcctcctcagaatgctcttatccagaccaccaaaaagcactgacaaatccgacagatagatagtctttctcttttcatgatgtctctgaagcatttggcagtattgatctcttcctccattttgaaactctctcttctccttaattatttgttcaaactccctcccagttctcctacctctctgttccttctcagtctctattgcaagagatcttcttttcctgtgcccatccttaaatgttgatgtttgcctggtttcggttatagctctcctctcttctcactccactgctttagctaacatcatatgtgctgatgactctcaatctttttgcagcccacatctctactgatctctagacccaaatacccaacttcctgctggacagctccacttggatgactcaaaagcatcacaagctcagtgtatccaacgcaccgaatttccaacaaatctaatcagcctatgttcttatttcaggaaatggcaccactatccattctcacccaaacaagamatctgggagtaattcttttcccttcccctcttaaccagatatctaatgagtcgtcaagtcctggcacttgtgtactgtcttctttccgaggtcagttccttcccctgagccctgattctccaacctctcccacctctgcaggaacctggatcttcattctcttcactggttccttcttatcactatttaatcatattcaggtctctctcatctcttaaaaagttgccacattgatcctattattctgtaaactcattcaacaaagtgccagatatttttctaggtggtatagcttcagcactgcataagttacataaaacctctcccctcagagatcttacattccactggcagacacagataacccacgcacataaagtgtcacgccatttttagagcacctaccgtgtgccagacactgtatttcattacttcatttagcytttacaatgggagcsgatcataattccaaaagacacaatcatgaacaccatagtcccaaatgctgaaatcctaaaagatcagccaggcgcagtggctcacgcctgtgatcccatcactttggccrgccaaggcgggtggatcacctgacgtcaagagttcgagaccagcctgaccaacatggcgaaaccccatttatactaaaaatacagaaattagccagtcatggtggtgggcacctgtaatcccaactactcgggaggctgaggcaggagaatcgcttgaacctgggaggcggagkttatagtgagccgagatcacaccattgcattccagcctgagcgacagagcaagactctgtctcaaaaaaaaaaattaaattaaatttaaaaaaaaaggaaatcctaaaagatgagaatcccaaaaactctaaaaccctgaaaatcacaattctgaaggattaaaatcttgaaaacatcattctggaaaaaataatttttaaaatttttaaaaatatatttatttacattcttaaaaggggatttatttgataaacataaaaacattacagaacacttcataggccactttacacaatgaaacgggcattaataacatacacattttattgcctagcataaacaggtatactaacgacaggcatgaacaggttactaatgacagtcacatggatataacaggaacaggcaaactgttcataaagaaataggtacaaagggaaacgtataaacacatttcactatagttgataattgtgtacacccaggtttacaactgcggtcatctgaaatactgtgacagacatctgaaataccatgactgatctcgtcacattcttttatcaagatcagtcaaaagccacagtgggtcactactgcatatgcagttgtccaaagagccaagatcttaagaaattttatctttcacaaatgcatgtatacaaaaaggacatctcttatcaaggaagtttcagtgtttttacatacacacacaatcgttacacataaagtcaatgtgataatgcacttttatggagtcaaatttgcaaaaaccctttacgacaaccccgtgaagtaagtgttgttatacccattttgtagatgggtaagctaacgacttgctcaaggtcatagtagcacagagccaggaatcaaacccaccaaccccaccctgtcctgaatcgaggctctgaaccatggacctagaggggaatgcagattccttttgtttggagaatgttttaaatattttcagtaggtacctgctgtgttgaaatccttgggtacrgacctttctgggaagagcagagtgctctataactaaagcttctctgcagagtgtctaagagtagcctgcatgggctagacaacctcaatgcctgtccatgacctggactccagcttacagctggaagaattgccatttgtgtcctctccttttctctgcccaccaattttttttcatatattccttagcgtcaggtgttgggacctcctctgggaactaatccatgttctgcttttaaattaattccacatcttgtctgagcttacygcctcctccattattcaaggaatttagcctgccagttccctataatggtataccccgtctctttcctctttgctctatcttccaattctcataggtggagctgcggtagacatccagaagttgtgggattttttttttttagatctccttctcagatgattagggacccacacttgcttgcaaaggtgaatcctgcagacctagctggttataaatccatcagctgtaggagaagttctaggcctcaacctgctaactgtttctgatggtgtcagagtacattgtttctcctaccccaggacaggacctgaggagctacatcttatccctttctaacttctactggaaggtgaatgacaggcaaagccttggtagaatgtcccagacaggcaaaaggcagtttggaacctgttgtgtgctatagaatcaaaagtgatatgaactggtctgccacaagatttttgagatactggaaataaggtttttgaaaacatttatggcaattagagtaagtttatgttgctgaatctaataaataaaaaataggcctggcacagtggcatgcacctgtggtctcagctatttgttaccaaaaaaaacccaaaaaaaccaaacttttaaaaatggagcttatattttatatgtgtatttccctccttccttccttccttccttccttcctyccctcttccttccttccttccttccctcctccttccctccctccctcccttccttcctttccttccttctttctttccttcctcccttccttccttccttccttccttccttccttccttccttccttccttccttcctcggagtcttgctctgtcgcccaggctggagtgcaatggtgtgattttggctcactgcaacctccacctcccaggtttaagagattctcctgtctcagcctcccaagtagctaggattacaggtgcccgccactatgtccagctaatttttgtatctttagtagaagcggggtttcaccatgatggccaggctggtctcgaactcctgacctcaggtgatccacctgcctcagcctcccaaagtgctgggattacaggcgtgagccaccacgcctggccttatttaacttttctagtgattcatttttattctattttataaaatcatcattctgtgacaaaatagaaatttaaaaagcaaaaccaaccgatccctcttcacagatggtttgagaagtgtcggactacagtggaaagaacaggttttygaagtgaatagggctgggttgctcaacctttctgagcctcaccttcctcatctgtacctatcttccccagagctaagagaaatggtgcatggagacaaaaacatatccaggcatatgtgctccgccagaggtgaagacagaggattgtggggacacagagaaggcccttcagctggaggagtgatgagagattgactggggagacgtcctggtgaagtctgatgcctgaactatgctgggaaaggtggggcttcggcagcaagaccagacacactggtgggggcagcttcctcctttgcagaccagttccaggctccagcctargagcaggaactgtagggatgcttagaagcacagtccctggtgagagcaggcaggctggctgcattcctgtggtatttgaggattgatcttgtcagattagcagctttgctttttttggttcaggtacaagatccccacgtggggagttcttgctgcttgtgaagagcaaaagctggtgaaagcacagaacatgatcctggccctcctcctgagctgtgtgaggctcccagccaggagcaagcagccctgtgagttcctcagtgagagggagggcccaggtctgagctccacccacacaagtcccagcgatgaggcagcagctcagcagagagcaagatgctggcaccttcaggactgtgtcctgctttccctactctgtctgcacctggggagacaggtcactctctgactggtctccccaaataaatagccagagctagaggggagaaggagggctgaagccttgcctccccactgtggaggcaggacatgagtctatgcctgcctgccatgatgagggcccttggctctgccttctgccctgatgcaggcaaagagtccagatccaggcaaatgaagtgtcagagggaagccacggccctactcagggagcctgagttcagtgaatctctcaggagagaggtctgggctggaagaaaacaaattgcacgtaggtccatacacagcccccagagtgtggatgagattgtccagggtgatgtggcgagtattgggccacgtggcctctgttctcaggagttcctggtcagggaaacacacacctgacagttggcagcatcacgaaaaaaggcctgttgacagctggccctgtgacatctttgtggcccttgtgttgggatagacccatcctctctccctcggtttcaagggcttagtatgcggaagtttcctacactggacaacttccgaacatagtttgaaaacagaagattggggctgggcacggtggcgaccagcctgaccgacatggagaaaccccatctctaccaaaaatacaaaattagcctggtgtggtggtgcatgcctgtaatcccagctactcaggaggctgaggcaggagaatcgcttgaacctgggaggcgaaggttgcagtgagccgagatcacgccattgcactccagcctgggcgacagagtgagactccatctcaaaaaaaaaagaaaaaaaaccagatgattggaaaaacaaaatgacacctttggctttgctgctcagccccttcagatagtgtgtctgggccacaggccaattgccagttgcggaacttgctctaagaagcaaatgcccaaatggagcaagtcctccaaatggggcaaggcatgtgcttraggcctgagctcagaaaccagctctgatgagggctggctctgtacctgctgtctccactggccttgctcccatgtgtccaaggtgactatgatcagtgaggttctggccaggttaagggctgtctccaccacattcccygtctccatcacccatcctcatgtgtacctcaagaccagcaagagggattaagggcaggactctgccagctatatgttcacccttaggccgcttctgaccatctcaaaccccctgcctctgctcctgtgcccttctcttcctgccctgtggctgttgcacacacaggggtccctgatacccaagtcccttcccctgaagggcttctttctgcccctccctacccctgagggcgtatgcaaggagaatgaccactggttggatcaggccccatgagcccatgtgggcctcctgatggaaagaatccttcctccaaagcaatgacctttttaaacatggtcagcagctgcctctggtttagccagttctgcctgtagcctagtcattttgggggcaaaatgaagaagagtgcaagaggcagtagggtagagcacagcaaaccgtgacccrcactcaaggctgtggggaaagatagctcatccaggaggcctgggctcctgacgcagccctgtctccagtgggcctgctccaggaaagttgctaactctcatagagatgcattcctttgctaccgctcagattattgagaggaaacacagggttcagagaccccagcgtggccaaggaaagctgttggcaaaggcacagctgcatgtagagtgaggttcaggagcaaagggtgagccttgctctatccatctctgttccagtcctcatcaggtactccacagaggagcatttgctaaaggaagaaaggtaggactggccatttctgccatgcatctggatcccaagggccatcctccatgagcagcaggtctcttcctgtctagccatgagcccctttccctaacccctggagtgctagatgcagaaagggagggcagtggagggatgtaggctatgtgggttacagtcaccatgttctccctagccagaggttgatcattttttccagcctgtaactgggcctaatttcagaccttttctgagggtaggttcaggaagtagaaagcttttgagctgaggcaaaagtggtcttactgtacttagactgtcatctgttggcactgcggtgaggctggtcggaggacgaggggtacatctttaccacctggcctcacygctgtttcaccgatccctgtggcttgaccttgtgtgcctgtgccaggttcacagcatctccttcatgctttctcagcaaagatggaatacagctgggagctcctctgcctccgtctgggcaagtgaagagagcttaggttttgaaatcaggcaaacctgggttagaatcccaactttgctactttgctagctgtataaccttggacaagcccttagtcatgttaaacatcagcctccttatctgcaaaatgcgaataacagcccccatctcatgggcatttatggggataacactaaataatgtccatgacatgtgtgtcctggtgcctggcatgcagtgagtgcctcgtctggggtggtaagtgtggttctgtctttatgctctgactgcctcaactctcatggagaccttccagtaatatgtcttggtgtggagctgcatacaaacccaggtgactggcatttgttgatacagaaatacttccacatattgggaaatgtggcttttggcaactccagctacacaggatgcaaccgatgactcataacttatgctgatgcttcaattaataaattaaattaataatttaagctgatgcttcctggtgccgtaacccctacatgccaatgccttactaacccatagtcttttatgcctttgtkctgtgcctgctagtcccccaacctggagtgcttctccatattctttgccttaagaactactgctttggccgggcacagtggctcacgcctgtwatcccggcactttgggaggccagrgcaggcggatcacctgaagtcaggagttcgagaccagcctggtcaacatggagaaaccccgtctctactaaaaatacaaaattagccgggcgtgttggcacatgcatgtaatcccagctacttgggaggctgaggcaggagaatcgcttgaactcgggaggcggaggttgcggtgagccaagatcacgccattgtactcctgcctgggcaacaagagcgaaaatctgtcttaaaaaaaaaaaaaaaaaagagagacaactactgcttttacttcagtgagtaacttgaacgttgtctggcatcaagcacagcagtctctgctgagagaactgcttgtggcaggcctctcccctccaaaggggcctggacaaggcaggcactcagcttggccagctgtccacatgcatgtgctgtctggagtgtctgtcctcacattctccacctttaaaactccagctcagatgtcacctcctctgtgaagcttttcctgccctggagctcccccagctctgtgtgcacctctatctgtaacagttctgtgtataccrcattataattccctcctgagaccttgtctaatttttacctctatcttaccctccatcaccacttggtgactgactaaactggggacagctcccatttctcttgcctttatcctatcaccacactccttgcagctggcttgggcttggggagggaaatggaagcggcgggtcctactgacctagttgggtgttctgccatgtccaggcccactgtgcagctgggcccagcactctgggcttccttcccaggaccaacaccagcagcatcaacagtgggcagagccaggcgcagtggctcacacttgtaatcccaacactttgggaggctgaggcgggaggatcacttgagcccaggagtttgaaaccagcctgggaaacatagcgagactctgtctctaccaaaaaaaaaaaaaaaaaaaaatttaattagcataatggtgtgcacttgtagccctagctattcaggaggctgaggcaggaggatcgcttgagccagggaggttgaggctacaatgagctgtgatcatgctactgcactccagcctgggtgaccgtgtgagacccagtttcaaaaaaacagtggacagagtctaaagtggctctaaggacatattaaattctggattattcttccttcaaaacattgagtttgacggtctccctcagttgactcaaataactggatattgcatatctgtctgttcactcatgtaatacatttttatcaagtgctgggcactgtgtgggcactggggaaatggttttaaaaaacgcaggcatggtcccagctcactgtctgggggaagtaaattgaagttgtagctcagggtttcagagacattcaagtcaagttgagagtgagagatttggttgggtactccctcacagctgcatttcagtgcctggctctgacctggccacagcacacaccattgctaagtgtggggctgtggggaggctgaagccctgcacccactccaggctgaaggcagtcacacagtagctgtgcgggctgtggcaagaatgagactatgacagccccggagcctcagaaaaactggcttgtgaatgactttgcatggaccagggttatagacaaacagaaatgacatctgaaaagactcttctgagcaagtcccctggcacattcacacaagtcaagttcaaacaaaaggctgttgatgacatttcttcgcacaagtcacgaaaagcttcagaccaagggtgagcagtttctgcttctgcaattcggagatcataaagaataaagaatgggttggggaaagcatagctccatcactaagccagcttccgccccctaaaatggggcctgtctgctcagtatgatgttcttaatcctgggagaccccacagaggccccagtctggcagagagtgtcctcagcgtgtgggagaagcctcctcctcctcttccatctctgtggagcagcgaccaggcctccagagaagagcatgcttgcatcagtacctcatagatcccaatctggacctgcccatggtgactgctgccccacttccaagctccagagaccccaagtattctgcccctccctgaacccctaagcattcactgtctaccaagccttgtgcagaggtctaggggagagtgacagataagaaactgagtgggggccgggcgtggtggctcatgcctgtaatcccagcactttgggagcttgaggcaggcagatcacctgaggtcaggagttcaagaccagcctggccaacatggcaaaaccccgtctctactaaaaatacagaaatyagccgggcatggtggcgcatgcctgtaatcccagctacttgagaggctgaggcagagaatcattttgacctgggagacggaggttgcagtgagctgagctggcgccattgcactccagcctgggcaacaagagcaaaactctgtctcagggaaaaaaaacaaagaaagaaactgagtgggcagtgtggttactgtagcaacagagcaagcacaaggagctgtgtgtgctctgataagggcccctraccaaactgcaggcaggagaggcttcctagagatggggacacctgtgctgcctattggaggacagttagaaactggccaggtagagaatctagggaagggcaggaatcacatggagggaaggagacacacttggaagtaatttggctgttggagtacaagtccttggtaagaggccttgaatgtcatgctgagaagtttgaactttattatgaggtcagccaaggtttcaaagcagggagggaaggacagcatcagatttgtgctttagaaaggtcattgcctgaaatggggagaaagggttacaggaggtgggactgaggaaggtaatgcttgggaagaggtgataaggacaagttcatgtcatattaggggaggagaaatgacaacattaggtggctggtagagggatgagtaaaaatggattcctagtttctgtttcaggcagctggcaaggtagtggcaccatttcctaacataggaaacacagggagaagagcacgcttatggggcagctgttgagttcatctggggagaacgcttagcttcaaattcctgcagaacatccctgtgaagcacccaggtcctttaagggatttttttttccgatttcttcctagtgtaaacagagtatctatgtacaacatttttttttttttttgagacagagtcttgctctgtcgcccaggctggagtgcagtggcgcgatctcggctcactgcaagctccgcctcccgggttcacgccattttcctgcctcagcctcctgagtagctgggactacaggcacccaccaccacgcccggctatttttttttgtatttttaatagagacggggtttcaccatgttagccaggatggtttcgatctcctgacctcatgatcctcccgcctcggcctcccaaagtgctgggattacaggcgtgagccaccatgcccggtcataacattcttatttataagtctttatgcaccttcctctctgtctctgacatagtgaaagaaattttttcattacatcacatgaatttgtagtatctataccttttagtcaccaaacttctcaacttgaaacctgtttacttaaacttccttccctccccttcctctattattaattttataagcatttccatatatttggcaccatgctgggtactaaggatgaaaagtaatacataatccttaccccagaacttgtctagagtgagtcagacatgaaaacaaaattagagaatgctgacatgatggtaaatgaaagtctagggtgccacaaatacacagaaaggagacacctaatcaaagtgaggtgtcaggaggggcttttttcctaaggtagatcactgggctttactcctcttctgccattattgtttacaggacctcttgaccttcattctgatcatctacttctagcattaaagggccaaagaagaccttttcattggttcgctggtgattgctgactcaccatcatgaggttgaaaagtagtctttcttttttgttttagttttgtttttggcacggattggtgccgtaagtgtcagtgggtgggatacattatgtcagtagctccttaagatacgtggtctgtggacctgaagtattcatggcccctcaaggccacaggcaaccagagccaagcagccgggccttttccagggctcctgacctcctctggaattatcactgtctgccccacactcccatatattttcagcactgcctgttctcaaagacacccaggtaaggacatgtcatggcccctttcagcagcctgggaaaatgccttggaagtttctttttcttccctactgtaagcctgcaggacagggaggatctgtaacagagaatacctgggagaagccatcttttgggggaaagtggtcagagaaggatttttgaaggaggtgatttttttttcaaggtgtggtagctcacacctgtaatccctgcactataaggctgaggcaggccgatcacttgagccctgtagtttgaggccagcctgggcaacatgctgaaaccccatctctrctaaaaatagaaacaaaaaaatttagccacatgtggtggtgtgcacccatagtcccagctactcgagaggctgaggtgggaggatcccctaagcccaagaagttgaggctgcagtgagccatgattgtgccactgcactccagcctggatgacagagtgagaccctgtctcaaggtaaaaaaaaaaaaaagattaaggaattaggcagttgaaaaatgacagggtaggtcttctagacagagggaatacataaactgagaacatgatgcacataaggacattcagattactgcacgtggtttggtatgtttggcacatagtgttacatcctagatgctggaagacaggctagaagtaatctagagcaagatcatgggagacctcacaagtcactccaaaaggactctagattatatccttaaagatatgggaaattaggccaggtgcagtggctcatgcctgtaatcccagcactttgggaggccgtggtgggtggatcatgaggtcaggagttcaagaccagcctggccaagatggtgaaaccccgtctctactaaaaatacaaaaattagccaggcatagtggcgcgtgtctgtaatcgcagctacttgggacgcttatgcaggagagtcgcttcaacccgggaggcagaggttgcaatgagcccagatcacgccactgcactccagcctgggtgacagagcgagactccgtctcaaaataaataaagccatcagatctcgtgagactcattcactatgatgagaatagcgcaggaaagacccacccctataattcaatcacctcccatcaggttcctcccacgacacgtaggaattgtgggagttacaattcaagatgaaacttgggtggggacacagccaaaccatatcagtaggaaaattggaggtgccattggttgaggtagagaacccaagaagaagatcatttctttcttatatttgatttctgacttttgggaggaggaaagggcagagatcatgaatttgattgtgtgcataatgagtttgagatgcctctgggacacttaaggaaagatgtagatagtcatttgtatatgtgggtctggggttcccagggagaggtcagagttaaagtgggagttatcagcacatagatgaagttttggcagtggtgaagttgtgtggggaaggtgtgttaactgggtcccaaattggcagcttgtaagacaaatctacctgtagacatgctttatggcacagtgttttaaaataatgtgaatacttttagacagtgtgtaattctagcttgctctaaccctgccccttcttgttgtcttatgtctggcccagttgacatatttaccgtaccttcttggctcttgtaggcatttgagttggtaattttttaaggaagaagaaaacagaatgacctaactctgaggaataccaatatataagggttgaataggatgaaggagaataggaaaaaatggctggaaagattagaggaaatcagaagagaatagaatttctctccaaaattatgggaggctatataggcaacatacatgtataataaagtataaaatgtggattccacttcatccaacaattccacttcttaatattgtacatacaaaagtaatcatatctgtgtatgcattattttaatatgctgttgcaacatgtttatgataatagcaaaaaactggaaacaccctaagtgcctctgagccaagcatgattcatgtagtatttccctatgatgaaatagtatgtggtcgtgaaaaatgtcagactgtatttactggcatgctcccacagtttattgtaaatttgttaaaaagcaggttatgggacactatatataaggtaattccatttatgttaaatgtctgtttatggaaggaaaagtctggaagccttcacacacaaatcacaagaacttcccaatagctaaatctagtagacctttctctggcctctgtttctttgacctgtctgtggcttttgacacagtttaacctttcttggctttctgctgcttgtcttttttccctagctttagtcccataggctggcactcaggactgaaaaatggcaaagtcattcctgggagaacccttcaaaactagcagtttgtttaaaccctgggcatacscaaagcagggcacctactgggcagttcttcctggraaggagcagttaggaacagtatcttcctgacccttacccccttgagtctacatatctcttctgggataaaacccttcccagggctctgggtacaagtttcctctccttgcctacctcccccaccctctagcaaagttgcctggctagcccctttctcccacgccttctgttcaatcaaggggttatttttaactgtgttgtgtataccatgcttaaatcctggcaaaacaccagagctttggaagagacacccgagatggaaatagtctcccacaacccctggcccctttccagagcttttccttttaaagagagaaaacaactaatccaaactgtagacagcccaatgaagaaagtccctagatgctagcactgagcagctgaacccacagccttggccatgacattagactggaggctggatctgctgcctctttgggcctatcttcagcccagggtaagtccaaggagaagatggttcttgccactttcctgggcttggtggttctagaaccctgtatcgtggaatcatggagattacctagtccattccccacttccaatagctggaagtccttgacctgcagaaacagcccattcatttcaagatactcatcagtaattggagaggtttaactatgaaaagccaaaatctgcctttctgcagcttccccctgtggtcttagttctgcctgccagagccacgtaggacgagtctaatcccttttctccatcagttgttcagagatttgaagctggtgatgtctcttgccagacatctctgcccgtatagggtatcataaagggcccctccctgtcacagtggttttcttctcttgtcagttccatcttacgacttttccccttttgcctttaggggacacccaaaatagagctcatgcttgctccaggtggcttaacagggagcatagaaggagaagcatctccccatttttgatgctcctcataatgcctcacacccaaaagatggtattttcttcaatggtcatgtcccactgaccataagcctattcttgacatgctcttgccaagctcrctcccttcccactcagcacgtatgatggaatgtgtgggtccaaaccaagcgtggcaaggtagctgtcattctggagtattttggatcctctttgttctccaatataaactgttcgtttcctttctctttatcttccatagatttgaggattaagccattctgttcttgtctaagcagtgcacataaaaacagcgactgagataagcctaacgcagaaacttgcccccaacgctacaggcagttagcagggctgttcaccagcttctgtctctcagaccaccctccctgtagccaaatccacctggaagggcagttgccttatgcttccctagamcttgttatggtccgcatgtggtatctgagagctccaggcaaggactcatgccctaaagaagagccacaaagtctagaaggagcatttaccccagagtcagaaatcagaggctcaaacatggctcaccaccttctctctttggacaagtcactcaaactctaaacctcagtgtcttcatctgtaaattagggggaatgcctgcctacttacttcaaatgaattttgtgaggctaaaatgatattgtataatgaaaaacagttaagagcgaggtggtgataattatttcataaacatttattgaaaccctgccaatatgtaagccctgtaagtgacataagtaggaatcccatgagccctgttgaattttgatccagcaggagrtctgcttaggccgccaggccgtcacaatcacaggccatgctgggagcagggaagcccaggtctggggaggggaacctgggacagcgcagagcacaggcttcccagaaggggctggagtcaggctgagaacagaccaccttcactggactggtctggtgtcaggacacatgttgtacataaaaggcctgaaacccaagggaggcaaggcaggagtgagacctcaggggttggaactggagatggagaagctcttggagagctgtgtctctggagggtgggggtgggagctggttgacatgaggctgaatctcaggccaggacctgtggtttgtgcatgtgaactgttcccrggagagcctgtgatgggaagacgataggcttgaagctagggggagacatggccatggagtgaagtgggtgtctgcagagaggcaaagtggaatgtttgcaagggccactgtggaaaggagaagaggctggtactagggaaccccaaaactgttgagcatggagaaggccaagtgggccaggagtctgtggcagccacctgtctgcttgtgtaggttttccccaacaggcttagtcctcccagtaccgaggtaaggattctgagaagtaacccctgtgccagaaagcttggcccagattgattgtgcctcctaggattcatgtgtaggaaacaccctctgttcctgaagtgaggagaaaggtgctggggcttggggcagtgacaggactcaggccattccagaagggagcagccatggcccgaatgagcagctggccacagataatagttcccaggactctcctacatgtgggacaacagcaggctccagtggatggagcactccagcctctttggaatgaggtggccaaagtacttggcaggatgtgcactgtaacaacgaggggaccagaagaaccctggtagagaactcaggagaaggaggctaggaatacagccaggcaatgtgctacatgaacctttgagactgagacatgagcccatgggtgaggactgttggacctgtgttaatggagtgtgagggagaggacggggtgtgagggagaagatggcatgtgaagaagaggatggggtgtgagggagaggctggggtgtgagggagaggatggggtgtgagggagaggatggggtgtgagggagaggatggggtgtgtgggagaggctgggatgtgagggagaagatggggtgtgagggagaagatgggatgtgagggagaagatggggtgtgagggagaggatggggtgtgagggagaggctggggtgtgagggagaggagggatgtgggaaaggatggggtgggagggagaggatgaggtgtgagggagaagatgggatgtgtgggagaagatggggtgtgagggagaggctggggtgtgagggagaggaggggtgtgggagaggatggggtgggagggagaggagggcgtgtgtgagggtaggaaggggtttgtgggagggaggagggggtatgtgggggagggggagcggtacgtcggtggggggtgtgtgtgggagatgactgggatgtgagaaagagggtggggtctgagtgagaggctgggggtgaggtagaggagggggtgagggtaggaggggacatgggaggagggggtctgtgggggaggggagaaggtgtgagggggaggagggggtgtgtgggggagatgattggggtgtgagagaggatggggactaacaaagaggatggtatatgagggagaggctggggtgtgagggacaggagggggtgtattgagaggggtgtggggggccgggagtaggaggagagggaggagaggtgtggggggaaggggggaggggctgtgggggggacggaggagagggtgtgttggggagaggtgagagggggagtgttggggaagggtgtgagcgagacggggtgtgaggggggaggactgtctcagggcagagagagtcctgccagggctgctggtgaggcacctgctgctcttcaccctgcctctgaccgggcactccctgagggagagggagggcatggcagataccaaaactgggaggggagagagagaggtgaaggaaactgacagtcattgagcaacatggtgtgccaagaacttcacatgccttatctcacttcatcttcacaataatccacgaggtagtaggtattattagcccctttttacagtcattcaacaaatacttagtgagtacactgctcttgtactggaggtaaagcagtgagcaaaactgaccaacagtcttgccttcatggggctcatattctagtgggaagcaggcaaagaamcgatatagaaataaggtgtacagtattttagatggtgggaaatactagagaaaaataaagcaggaatggaagttagagaggggctgccatttgagattgggaaagaccttcatgggaaggtgacatttaagtaaaaacctaaaggaaatcagggaaggccmtgctgatatcttggggaagagccttccaggcagaggaaacagccagtgcaaaagctctgaggtgggatccaaatgcaggaaagatgcctgtgttaaagaagtgggaaatatgagagatgaagtaagaaagagaaatctgaatcatgggagtgttggaggtcactctaggaatggaggatttggagcagaggagtgacttcagttttaaaggatccttctagctgccttgatgagaatagactgttgcaaggcagtccgattgggaggctattgtgacctacaggagagatgattgtgacctggaccacggtggaagcagtggaggtggtaagaaagcgtcaagttcagggtatattctgaagggagagctaacaggtttgctgccagcacaggtgtgagtatgagagaaagagagtaatttaggccaactaaaagtgtgtagcctgagaaactggaagaatgaagatgccatttaccaagatggagaaatgactgcaagaagagcaggttttaggagcattatgaactcaagtttaaacatgcagagtttgagatgcctcttagacatccaagtgtagctatcaagaaggcaggggaagggccaggtgtggtggttcacacctgtaatcccagcactttgggaggctaaggtgggcagatcacctgaggccaggggtttgagaccatcctggctaacatggcagaactccatctccactaaaaatacaaaaattagctgggtgtggtggtgcgtgcctgtaatcacagctactcaggaggctgaggcagaagaatctcttgaacccgggaggcagaggttgcatgtaacgtgaaccaagatcgcaccactgtactccagcctggacgacagagtaagattctgtctcaaaataaataaataaataaataaaataaaaatacaaaaagaaggcaggggaatatagcagtgtgtggggttcagggaagaggtccagactatgaaaatggatgagatcaccaaataagtgaatatggatggaggagagaagctgggactgagcccagagaatggcccacacttggtgtgggacattgagggagcaactgcagaaaggaatgagaaagaggagtgcccattgcaacattaggaaatccaggaaaatgtgatattctggaaaccaaagaaagtattacaaaaggagtaattaactgtgtaatatgttgctggtaggcaggatgattgtataagttactatacaaactagggcacttttgagagtgaaaatggacaagattaattactccaggataagacacataaaccaacattgtcccaggcaaatcacaatgtatggttactctgttgataggttaagtaaagaattgaccattggatttagcagcatgaaagtaatacgtgaccttaaaggatcattggtatggattcaagagaaatgggaggagagagattggagacaggcaaatgtagataactctttgaaggagtgtttctgtaaagagatggagataaaatgaataggtggtcactatatgggtgatagttgtactgttcttttaacttttctgtatgaatgttttcataatgtaaagttagaagagtgcaaattttaaaaccttaaaaaagaagagagaaggggtttaatatggataaacaacgtatttgtttgcctatggggataatccagaaatgagatgatgtaagagtgaagacttcctggagcagtgtcctttagtaaatgaaaaagataaggtctagggcacaaaagttggccttagttacaaatatgggcagttcaaacataaagtagagaatataggcacaaatgcacgcaagtagtgatacgcagcttgtaaacattctgttctgtttgtttcacatatttcagtaccatggtaaacaaggttatctatgggaacaagaatgagggaggtgttggaattgtagagagaaaagagaaagtatgagtagtcatccaggagaatggaagaatgactgagctgataacatatatgattgccaggaagcataagggcctcactggtattttgagtgagaccagccagcaaccagcatggttkttctccagccagacatattcagctgtgtaggtacatccccagagtaggtaggaatttcgatttaatcaaagctgtgtttcccccaaatgagaaaggaacaaagaagctgagggtgaatgcaaagaagtgattataatgattgatttggaatttaagctggatgagaattgcagtaagaatataaggaagtaaaggacagtgaaaagacggtcaaaccaatggcttgatgatttcagtgtgttgaggattgtacgagtttagctaygacagcaggtgagctatagatacatggaggcagtcagggagtgagcttgagactgacattagagagggctttagttattagcagcgacctagtttaacatataatttaggagtaaatagctgagataggaaagagattaagatcactggaggaggggaggccaaggcaggcctgccttggagtttaccactttctatgtttggaagtgatattgtttggctttgtccacacccatatttcatcttgaattgtaatccccataaaccccacgtgtcatgggaggaacctggtgggaagtgattggatcatggggggtttcccccatgctgttctcatgatagtgaatggttttataagcatctggcatttcccctgcttgtactcactctctcctgccaccttgtgaagaaggtgcctgctcctgtttcaccttccgccatgattgtgtttcctgaggcctccccagccatgcagaactgtgagttgattaaacctctttcctttataaatgacccagtcttgggtatttctttatagcagcgtgagaacagactaatacatgaagaaaattcatctctcctgtttcctgctttttgataaaagaatacacaaaaaatactgcacctgatgataattgctttagaatttctcttcttcttcttcttcttcttcttcttcttcttcttmttattattattattattattatttttgagacagggtctcactctgtcatctaggctggagtacagtagtgtgatcttggttcactgcagcctcgacattccaggctcaagtgatgctccccactcagcttcccaagtcgttgggattaccttgccaccatggcaggataattttttaaattttttgtagagacagggtttcgccatgttgctcaggctgatctcaaactcctgggctcaagcaatccgcccgcctcggcctccyaaagtactgggattacaggcatgagccactgcgcccagcttagaatttctcttcactttatttttgactgagcctatagttgaacagggagatatctgtcaaggaagggggtactagacttgccaagcacagggatcataaatgatttgtggccctagaacatcaagactggaagaaaagcagctcaagtcatagagcagaccctgaggggagagagccagtcaagcatcgggattgaggctcttagctgtcaggtataaaagattcagtccatagaggccatcgtaaggtactgtggcaggaaaggctagagatttgggcctgagtcagtaatgtggarctgctgaagatcttccaatgaagggacaagataggctgggacttgcttatctccataactttaccaggtaatggcagtactatggcctggaaaggtgtcatgtgtctagaatgacctacagcaagtctctggtcctccttcctggtggttggctggatggccatggggtgctcattgcatgtggatggacgaatgtgaaagaggaatgctgcagcccagtagttatggttgtgacaggtccctatccagtgggcagggcccattgttgtagctattcattcattcattcattacctataatatgctaggtgctgttctaggtactaggcatgtgatgttaaagacaaggcatggtgataaaactgtcacctcagctcgcccaggaggcgagcagaggtgaaaaatggcagaaatagtaggaataccagcctctgcgtttgtatgggggctggaattcttattgtgggacagttctccctatgcatctcgacaatagtctgtgacaggtttctatcactagcttgacccatcccatttgatcaggtgttcagagagagaggattctgcccctacagcctcacccaaggtctccaaagtcaggaacaatgtttgagcccctggactgaagaaggcagctatagtattttcctgtaggaacagagtccccagctaggactaagggggacctgcatgggaaattccaggagcagtctgcattcatgcattgcccagtctggggcgatgatgatgattgtgatgtcatctagccacgtgggtgcagggtcttctgacttccctggtcagcagagttggctcacccttctcacttccctgcagagaaacacacagaggccacattcaggaccccagagatagcaaacaagcagataggtctccccttagtctgtgacttggatgctcttcattgaagaaaagasagatggaataggtttaggggaagataatgggctccttttttgatgtgttgagcctaggtgccagtaggagatcttggacaagatactccaggtgcagttggatatataagtcttgagctccggatacaggtctaagtttgagatggagattcagcagcccccagttagaaatatgtgtctggatatctggaacttgaaccctcctgtaaacagtcgcattttccagccttttctttataaaacctgcctgggactgtaagcaatgattggatgcagagcagatagtggtcagcaatgactgcccttgtgccccttccctgaaggtagagggtctcatctcacagaacagcatctgctcattctctgtcatgttgtctcactccttagcagaggaaaaaagatggctgaaaccttcccttccaggaatcccatttctaggggttcagaaagtaatgtatctgtattaatttcctgtggctgccctaacagatgattccctcacagttctggtggacagaagttcaaagtcagtattcctggactgaaatcaaggtgttagcagggctgggctccctccagatgctctaggtcatatccgtctctcgcctcttctgcctctggcgactgctagcatctcttgtctcgtggccgcatctctccagtcttgacctgtggtcacattgccttttcgtctgtgtgtggtcaaatctctctccacctctctcctctaaggattcacaatggtgttagggctcacctagataatccaggattatatcctcatctcaraatcttactttaggaagtgtacatcctaccagaaaaacacaagcaataaacaactaagaagtaaaatatttagtaaattaccacaagataaatgccatgggaagaaagaaaatrtggcaaggtgacaggagcaagttgcattattaaataggatggtgagggttggcctcaagggaaatgagagatttgagtaaagactggaaggaggcgaggaatgagccaaatgtgtgtctgaggaagaacattccaggcagaggaaacagctctagtcaaggccctaaggcagcaaggagtgtggctgggggactgtgaacagagggagagtagtaggagatgagaccagagaggaagttggggtgagggagatcatagatggccttataggctgttgtaaggatgtcagcctttactctgagataggaagacattgcccatgtggaaatattgatctttgatagaagaatggaattttgctcagttttatcaagagggaagagcagacacggtagttttgaatatttggtggaaggcagatctctgatctcacttaccaaatatttattcagcaccttttatgctaggcacaattctaagtactggggggcatgacagtgaacagaatgggcagctcctgttcacatggagaccctccagataattacaccctccagataataacaaacaagtgcacatgggagacaggaagcaatgcacaaagagtgatacgtgcttacagagaaaacaagagaagatgacatgttagagaatgactgcggcaggaaacccactttagacagaagagtcagagaagacgtccctgaggaggtgacattycaacagaaatctgaatgaaaacatagaaccagccttggaaagatgcagagccgttgtggaaaggtccagactcagaaaaaggcttgtatttaaggactggacagaaggccagtatgctgtaacagggtgaggaaggaggaggatctggggtgaggtgagacgtgagcattgggccctttaacctgtggtttggcttttttttggagacagtgagaaggttcgaaccttcatggcatggttggcatggtatggttgatgatttatcatcctggcctcctcgagagaatggactctgagagaaagacaagagcagaagctgcacattgaccatcatagtggtccagaaatgattatttggactagggccgtagcagtggagagaggtaagtgggtgaatttagaatatgtttagtgattgtattaacaggacttgctgatgaattggatgagaggcagccaagaaaaagagatgagtcaagaatgactccaagggatrccatccagttggcaagagagagatttgtttgtaaaataggtgttgctctttgtgaggatctgggaatatgggactaaaagagaaaaaagaatgactcctaggttttggcttgatcaactacattagcttggcccctgccttcctcaccatcaaagccagagccgctgctcctgcaccgtgaccctgcgtatcactggtattctcaccactgctttgaatcccatcatactcctgtccttccatcaaacctgctacagcagggcccaaacgtggttggatccatctgacttttcctgctcctacttctgggctgcttggcaccactgccttggcgacacacaaacacagccttggcgctactgtggcttcatgctctccagcctctgtgcacagcttagcaatccttgtccctgtcccaggggagcatgaattggtctggttggccctggaaaatccacatggtggaggctgtcaccccaagctgctcctgtctcttgcagcccacaggcatttacggagcacctgctgtgtacttggctgagagctagsggtgccacaaagtctgctggggaactgggcaataacattagcatgtgttaagtgctaaaaggtcagtgtgacttaccatggtgactgtcccaaatctttcctattcataagtccctacagtctacaccctcacactacaaccccaaatcttcccaaggaaaagagtcgatgtggtgagcattttctcaggttctccatacctctaagctcacctgtcagagtagccatcttcacatcctcctccctttccacggaaaagatatcctgtcttctgtcttcctcccctcatactctggatctatccccttcctctcctcccgggcttcattccactgttacgctggctgtcacctaccccctccctctctccgcttgtctcctttccatctgaatacaaacatctcagttcttcaccatcccacttcatctccagcctccattccacttctgtcctctccttcactaccaagtctctttagaaattgtctgatctctgtcttgaacacttgctcacttctttccctcctcaacccctgcagttggttctgtcctctccattccccaatagtgtgttccctaaggggccagtgactttcatgtattaccagaagcaatgcggttaatacgaacgaggatataaatagtgcccatcctgaggtcactgtgagattaaatacgaaaatggagagagcacttagaacagtgccaggaatgcagtaagaactcagttgtcattgctattattactgttgttattattgtgacgttgatcatgtatttcataactgcctctctgtttggctgcctcacccattatccaccaaggcagggactctgagttcttttttttttttcctttgagacggagtctcactctgtcacccagactggagtgcaatggcgcgatctcagctcactgcaacctcctcctcccgggttcaagtgattctcctacctcagcctcccaagtagctgggattacagacgcccatcactgtgcctggctaatttttgtattttcagtagagacaggrtttcaccatgttggccaggctggtcttgaactcccgacctcaggtgatccacccgcctcagcctcccaaagtgttgggattacaggcgtgagccaccacgcccagcctctgagctttttatattcccaatgactagcacagagcctgagataagctggggcttagcacatattagagacacagacggtagatgctggtcaccaacaggaccgtgcctttgggctttgggttatgtggcctctgcagacaatctggccatcaaccaggctcttcctgaggcaggggcgcctgcctgacatggcagcttctcagcacacagtttcctcccctacgttccccacttccctccctccttcctctacacaaggcacaggctgtcagcagagtcagtgggagcctgtcagcaggagcccaggcactgcccccttgagggcctctggctcagcctctcctctcctccttcagcacaggcctccctgcctgtcacacatgtcatgcatgtggctccagcttgtctggacacggatgtggccacagttcctaggcaggcggggtgggggcagtagctggcagtatttcagaatggggggtgggggtgtctgtgaacattggaaacatcactggaagcctggtgctttggaacagggagatcaaagtgtccatgaggatcacacagaggcggtccccagactgccacaggtgagcaggaattggcctggattagccctggaagatccacatggtggaggctgtcaccccaagctgctcctgtctcttgcagctcacaggcatttgctgagcacctgctatgtgcttggctgcaagccggggggtgctacacagcctgcgggggaactgggcaataacattagcatgtgctaagaggtcactgtgcacaaagaacactgatgacccagaggagggtttggtcagccctgtgtggctcagggaagacctcagagaggtagagatgctgcagtycagtcttgaggaatgagcagaagttcagcatgtgaatgataaggagacgagaaccccaggcagagggaacagtggtatagaggcatggaggcgttaaagagcctgatagactctggaaattatacatagttgtacggggctaaagcatagggaaagggaggagaagagggggtatctgaggctggagaggtagacaggagccttgtaaatcagactgaagagcttaacctttaccttctaggtagcagttgcagttggtaatatcccatgtcaaatgaattcaagcaaaaaggaaattgtattagtttacataactgtgaagttcaggacctgaactatctttaggcccacctgaatctaggactcaaacagtgtcttcctccctgcagccatagaagatggctccagctgttctaagctcgaagttggcacattgtttttcttaaagggccagatagtagatgttttcggctttgtgggccatatagtctctgtcacaagtctctactgttgtaggtcaaaagcagccatacattgtttaaatgaataggtgtggctgtattccaataaaataaaactttagaaacaggcagctggcctataggctgtagtttgcctgaccctgttctgggcttgcatggtttgtataggtcactatcttagagaaaaaaagagactcccacagcccccagcgtccaaatatgaaatctcagagaagaccatggtgcatagcacttaggtcaagtgcccattcttttatttatttatttatttatttatttatttatttatttatttatttttgagacaggctctcactctgttgcccaggctggagtgcagtggcaagatcatagctcactgcagcctcgacccttccaggctcaagcggtcctcctgcctcagcctcccaagtaactgggactacaggcgtgcactaccatgactggctaaatttttcaattttatttttcataatgacagggtctcagtgtgttgcctaggctggtctcaaactcctaggttcaaacagttctcccacctcagccttctaaagtgctgggattacaggcatgagccaccgtgcctggctaggtgcccattcctgagccacttaggaaggggtctcctgattggtcagcccagacatgtgcccatcccagtagcagtggtggggatcagccgaaccaggagcatatggaatgaaaagggggatgctattgtagaagacaggggaagagatgtggatatccactgcaacgtgccaacaagaaagagcatgaactgagtgcctgaaagtaccagtgatgatccagcttgaaattggtcctgacacagcctcaggcaccaggccagccctgcagtgctgatgcacgccctgcctggccttttccttctgtgcagtatttgcatctcagctgctttgtttacacctagtcagaatgcacttgcctgcccattcttcctcacacattgctccacctgcctgggtggaactagagggcagagttacaagggtgcggggtggggaggstgccaggctgaagttcctctgccrttgatgggggctacttccctcctccagcctcagcattctctctccttatcttgaagggacagttacttatggttctcttctcttctgtgcctttgtcttacaactacccttctgaacattctccaccaggcttaacgtttatttacttgtctttcaaggcttagctcagctttgccattatctcctttgagatgtctttccagtaccctcaagttggtcagtgacctttgtaccaaaatatagcatcctattccagaatatagaatgtggacatatattacatatattttcttatgattatttctctacctgtctctatcactagcttcttgaggaaaggaccaagcctaatttacttttaggttctgagctcgtactcagcacaggacctagcactgagtaggcaagcagttgttggatggggccgtgttttccagctccatctagtcccatgtaagatacggaagcaagagcttcctgaacaggcttggaatagtacttgttggttggcacctgatgtttgtctctttacctctgagctacctctctcaggacatatgatgcccacctgctcttaaacttaccatcctttctccttcgactcctgctctcccataggacccatctcccatggaattcattcaagtggtcagcaaggggaacgcagcaagacacatatttgacagggcatttagaaagtgttcgcattacttgcttagacatacaccaggctcttcctgtgcatggccctttatggtggggctgcagcagctagatcccaagcaagaccatgtagactctagaacacctatctccctacgttatgtctatcccaccactactcagagaaggttctaggaaggtggatctgtgggatttggcttcatcctgttggatgacagtctcaccttgtgggagccaaggcctgtggttgaatataacggactgatgtgctgtggtccctggtctaagaactcattgctgggctctgccttccctttgtctcatgggctgcttgcactcgtcacagtcattgggagaagtggctaaaaggctggccacccaaccaaccaggcacagatgtcaagctgaagccatctgttaccctaatccagcaaacccatatctggaagcacctctttcagttgggttggtaggaactaggagaagaccctaccctagatctgctggtgcccacacataactactccctcacctcactccttaataagaccagtcagctttcttgccagtctgtggatacaggcttaatattccaagccttagaacatggtttaggttgatgagccagtgttgaggacattcaccttatacgctgcaccttagccacatttttgagcattaagtgagctggaagatctcttaggagggccccaggttgcccttcctggctggttagcctgacccttatgcttaatcatagtcctctttcagtctacaggtctgcgagcagggcagcctcctggctcctkaggttccatctatgctgtgagagacacaggggtcagatccacactcagcatgtactctcccagggcccaaaacccccaaactactaggctgtaggatctaaggagaaaggataggcaagttccagtgcaacttccgtctcctccttccccgggtccttctcacgcactcacacacaccctgctgaaacctgatcctgaggctgcctcgcgtgccggggtgctggcggggctggcgggctggggcctgtcttttggagcctgccccaccctcccctgctaccccctaggccagggcaagcaggtcaggcgtcccacacccccgctagtctgaccagtcattctataccttaagggccacctccaccctggccaggcccccaaactggcacactggtctggacggaagcccctggattctgttccaggcatagcctgaggttaggccacctgcataattaacacacacacaccatctttaccatcaccccaccccgacatttcctgttgtttataggccccagcccattttccaaggcctctgcaggtgtcaagccacctcacaggggatgaacaaagtgcagtgggaacactggaggaagaatgcaagcctccctcggggagtcaggggagactgtcctgaggaagtagtctttcagcttgataagaatgaaacagagcagaggatgccagaggctgggaagggagaaatagggagagacttgtcaaattatacaaaatcacagctagataggaggaataaattctagcgttccatgacactctggggtgattgtagttaacartaatatatagtttcaaatagctagaaggaagatattgaatgttctcaacacaaagaaatgataaatgttggccgggtgcagtggctcatgcctgtcatcccaacactttgggaggccgaggcgggcagatcacctgaggtcaggaatttgaaaccagcctagccaacatggtgaaaccctgtctctactaaaaatacaaacattagctgggcgtggtggtgcacacctgtagttccagctactcgtgaggctgaggcaggagaatcgcttgaacctgggaggcgtaggttgcagtgagccaagatcacaccactgcaactccagcctgggcaacagagcgagactctgtctaaaaataaataagaaatgataaatgtttgagatgatggatatgctaattaccctgattggatcacaatacattatatgtatcacaacatcactttgtactccataaatatgtacaattattatgtgcctattaaaaatttttttaaaagtaagaatgcattttttccaggcctatagagaaggaaagtggttgggaaatagagcagaggtgtacatttcaggcagagataatgcatgtgtaaatgcaagaagacggacatgtctacaaatagtgctgcgctgggagtatatataacagtagtcccagaggagtaaaatctagattgcattagattggagggtgactaggagatgaggaagtggagacaggatatccactgctcttcctagaacttttgccatgaarggatgaaagagaggctggtagctaaagcgggtacatggccaggacgctttgtcgaatttgtttgtttgtttgtttgtttkttttcacaggggagagacctgagccttattgtgtgcataaagagaaacaaacagaaatggaatccatagcatgatagaaagatctactttggtgtcatagggatggggtaaggaggccaaatttaagaataggtaaaggggctgatagatttgtgggtaaggaagccagaagctgagggagtacctatctgatggtcttggtttttctgtgaagtaagagaaaagatacctgcttaaagagagttggaaaaggatagagtttatggagagtagagaatgtttggaatagctgctgagcaaagttgagggcccagcgcctcataaatttgtggtggcatcagtgcactttagtgtatatgtgtgtgtgttctcgcagcccctcaagtataaaaggtacaacagtgtaagattagataaatctctggttggattttgcctaatgtgtgggacaaaagaacagtggaaccaacgggtacaggaccctggcaagagtgagattgaggagatggatgggatctagccaagagagataatagactagaagtatgtatagaaatcaagtgggtttggagtgtagaaggcaaaggagagaaagagaaaatagaacatgaagaaattgcattcagagagtattggagattaatattttcaaagtgatgaagagtttcagaatgtggctgtgggactgagtgcctgacrtggagtgaagatgagagggtcactggagtcaagtaagtcatcttcgaggccagagttgtagtaggcattgaagtttctgaaaataattgagcaagaattgggtttgcgtagaatatgagacagatgctgaaaccttgaatgaatatggcagagttggtagatgatcgcttgaaacttggtaataaaagtgttggtgatgtagtgatggaggtgaggatgatgttggggaaagttatggtgctggctgtgattgttagaaattccacatccaccactgtcctttctgggagttctagggtaacaagaatgtagagtgttccaagtccttgttcccaccttgaaacctgatctccccatcaccatgaaagcatgcctgtggccaagagaaggaggaggaggaagagactagagcacagcacaggacatgttgagggaacagtctttgaatccatgcagctgcaatcaatgatacaaggaggggaaaccaggagaaaaaaacaagcatgcaaatctccaaagaaaaggtgaagaaaagccacaggatagtcttagaagaggtaaagagaggcctttgttagtcatatggaactagataaaattggatctggtctttaarccaaccagaatagaccagagatttaaatgtaaaacatgaaaacacacaagtactaaaaaagtatggatgaatttctctataacctggggatgagaaaaactttcctatgactcaaactccagaagcaataggggaaagactgataaatttgacttaaaacaacaacaacaacaacaaaaacctactgtgtgggaggccaaaagtgaccatagcagcagctttctgcctcctgctttgagaaaaaataaaaatcttttgcaaaaatgaggggggaaataaagaaaagaaaacaccacaacccaagtaaataaataaacaaacaaacaaggggaaattttgtaactgtatctcagagagtttatatattaaatatataaagaactttaaaaaaagagaagaaaaaaacaatacctaaaaaataggcaagagatacgaataaagtttatagaaaaagaactgcaaatggctcttccatatatgaaataatgctaaattccactcataacaaaagaaatgcaaattaagatgacagtgaaatactattttttttctatcagactaacaaaatctaaatgtttgacagtgtactcttggtgatgttgcaggggctgtgggggagtggcactttcatacatcactggtgggtattgcaaaatggcacaatccctgtggaggggaatttggcagtatagagcaaaatcagagatacacactttccctttgatccagcaaacccacttttaggaatstatttcaaagatacattggcaaatagaaaagacatatgcattaaattattcattgtaaycactactagtagcacctactttacaaaagactggaaacaacccaggagattgattgaataaaataaggtacataatcaatcatgggagtattattgagtatgtaattataatggagtgctcaccaggatatattgtttagtaaaaaaagaaaaatagacaaaacagtatgtatactgtgttacatttttagtgaataaagaagggaacaggaatacacacacacacacacacacacacacacacacacacgtttcatttatttacttatatcaagaaaaaaggatacaataaaactaataaaaatgaatactgtatgggactagaagtaacgggacagagatgaaagctagacttctttgaatgtattttgtttgtgaatttaattgtgtaactaggcaaaactctatatcatcattaaacaaaatcaattaaaatgagggaaaagctctcccttaaaaacaaaagcagaatgaaacaaatgaacctaactatgtatcatgtcattgataaattaaactcagcagaattatttcaactggcaaatgcaaagtaatttgtctgttcttctagtggggtataccctaaggcagaaggaactgcaaagaaaccttaaattgtttttagtaatggtagtgttagtagtatactggtattgtttttctgaaaccattatatacattttctatatgtatacgttaggatcaagcaaaaacagtagttgtgttaatgtcactggaaacaaggatatcagcttaaaagagatacaaatataaagtcaaatatagtaggtaaacaattttttgctgtgtgaattacatatcataaagctgttttaaaaaagaaaaagaagataaatacaaatcttataatcctaattttgaattggaaatactagttacaaatgaatgatgtattcttttcagaaaattaattcccaccctgagcaatatagtgagactccatctctacaaaaaataaaaaataagccagacttggtggcacatgcctgtagtcctagctacgcaggaggctgaggtggaaggaatgcttgagcccaagagtttgaggttgtagtaaacamagatcacaccactgtactttagcctgggcaatagagcaagagcctatctcaaaaaaaaattatagttaaaattttaggtgtgataatgttttaagaaaagttgtttaggtgtggtttatgttttaaggtgtccttatcttttagaaattaatgctgaaatattttatggatgaaatggcataatttccgggaattttcaaaatagtatacaaagaaagtggatggggtataaaagaaacaaaactgaccatgattgaaaattgctgaatctgggtgatgggggtggcatggttgacagtactattttttctgcctttttatatgtgaaattttccataatgaaaagtttaaaaatatatacaccggaggaaaaaatgagttccctttgcaaagagatgcacctaactagccgaagtgttagaggagagctggctgaatcattcaaggmatagaaagagcagctacagaaagaaaatccaaagccaaaggcctgataaaagagagagacgaagtggaaagtgtttgaggctgagcatggtggctcacgcctataatctcagcactttgggagcctgaggcaggaggatcacttaagtccaggagttcaagaccaccctgggcaacatagtgagacttcatctctactaaaaataaaaataaaatgagaacttagctgggtatgggggtggatgtctgtagtcctagctactcgggaggctgaggtgggaggatcacttgagcccaggagtttgggattacagtgagccgtgttcatgccactgcactccagcctgggtaacagacgtatacgggacagatgaacatgctcaacaatatccgaatgcaactgggaaaatatggaatatggggcattctacaggacaaatagcctgtatacatagaactaggaaatatgtgtatgtcctagttttgacgagcctggaaatgatgactaacccataacaacatgagcttccctagctactctgatggtgatctgtaaataccattaccaattaaaaggaaccagggttccttgggaaaatgactgattccaggttggggcaagaaatgtacaagatcagcctcaaaaatcttttcatacaagaaagccaggacattatcaaagattactaggatgtgtgcagaagattcaggagccaagttgaaaagactccactggccaaagatgggataatctgagcatcaaaaaataatgattggctgggctcagtggctcacgcctgtaatcccagcactttgggaggccaaggcgggtggatcacctgaggtcaggagttcaagatcagcctgaccaacatagtgaaacctcattgctacttaaaatacaaaattaaccgggcatgatggcaggtgcctgtaatcccagctactcgggaggctgaggcaggagaatcacttgaacccaggaggcagaggttgcagtgagctgagatcgcaccattgcactccagcctgggcaacaagagcaaaactacatttcaaaaaaataagtaataaataaataagaataatggctacaaaaattacaatagattgacatatatcaaatacatgaaaatgtctgaattcctaatgattaaaacataaaaaagcctcattaatcattctttgggggctgttaaggaatcagctcattattctgcaaatgggtaaataagggggaaaattaagcattttatctcatcttttctgtaggactgctaccaaagagttagtgagagaaagtttatagaagtactgtagcatctcctaaagaaaggatggatctaggcggtgatcctcagtggctgctacaagcattctgtgcagagccgctgagaacttttatcagttctagccaagaacacttgaacctagtctttttttaaatttgagatggagtctcgctctgtcgcccaggctgtagtgcagtggcgtgatctcrgctcactgcaacctctacctcccaggttcaagcaactctcctgcctcagcgtcccaagacgctgggactaccagcgtgcccaccacgcctggctaatttttgtatttttagcagagacagagttttgccatgttagccaggctggtctcaaactcctgacctcaggtgatccgcctgccttggcctcccaaagtgctgggattggaggcacaagccactgcgcccagcctgaacccaatcttgatcaataatttttttttttgaggcaagttctcacactgtcacccaggctggagtgcagtagtgtgatctgacctcactgcagcctcaaccccccgagctcaagtgatcctcccacctcagcctcccagatagctgggactacagtctctgtatagcaggagaaaggcagtctacaaagcaatctacaaaataatataggaaaaggaaaatcagtttcaakgtataccataaggttaattatctctgtgttgtacagttatgggtatttttattttttatgtgtgcttgtctgtattttttccaaaattaacacgatacaggttgcacaaaaaatgaggtgtttttaaaagtaaaacttactgaactttccaatcatctgaataaaaagaaagcagaggaaaagggaaaaaaaaatgtcgagatcatttggctagatcttaggcatattttattagcatatgacatctagtacatattggaaagcagataaaatcctgtccaagcttgactctgagagaaactttccagaaattttataagctcagtcgtgacacagaagaagaggttcttggtgcaggcttatccagggaccatgtttgctttgatattacacatagaccatgaccaggatcctcagagcctctggcaaaacatcaaatatattaatttacttagattttatatacttggcacaagaaatatgcattacccttttacatggggtggtagtgggagtgcactgactcakttgctgggacccaactcagagctcccaagtgttgacatcttcctagcaagagtgatgggggagggagcaggattccaagttttctgcctctttcaagttcatgtcaaaatctctaataatagcagacctctgagtgataactgatactattcctcctgggactgctggttataatggtgttagtgatgatagggatgagaaatccatgctgtggttgcttctgggcttggagggccacccctgcagcctccagttattcagtggctgattcagggtgagttagaaataacaacacagagccacggaggcccaggcctccacacattcatttatggccaggaaggtcctgagcaggccccattgcagaattctcagcacacagtgagtgatcagaaactggccatctttggggctgccaggttccctgaaaagggccttcaaagcagggtgctagcgcccatgtgaagttgtgctctccagtcatctctgaagagctcaattcctgctgcaccttctccctcttcctcacttcccttcccttcagacttcgtctcctcctccccaagcctgtcccctccstgcccattccaagaagagtaagacttgcctgttctttcaccccagctcagcatcacttcaccctccttctctcgcctttgcccccatctcctctccaggcccagatcaacccttcccctgaagctctgggtccctcctcacttccacaagaacttagcctcctctctttccttctctccaccagcaaatgcactcaaattcctactggtctgaaacctctcccctcggccctgcctcctaggactctgctttttctttctctttcctaccaaacttctgtctcctgtagcttttaacctgctttgccctctcaccatgaattctccttcttcctcactgtgggtggtccacttcccagaattctctccaaaatctgtctccatgtactggctgtatttttggatatatttctgctcaactggacagtgtctcatctctgtgttcccagattgcaggaacagtgtgggcagcagtgactatttgatgaatgcctgcacaaccttccagagagcttccagctctgagaaattgatccttgctgaacaaatcttgtctctccactcctacagctagscaaataaagactgaccaggcctactccctcagactcaggctccactgaacaagatctgtcaaacccctcgacagctacccagtgaacaggctgggtggaggggggtatgccggaatgcagagggggcttccagcagatcctttgccaagaccgacgtacggaagtgccaccagtaatccagactgttgcgtttttgtgatcctcagcagtcctgttatattccaggttctccaagccagcacccatgttcctggatgactcctttcgcaagtgggctagaatccgggagttcgtgccgccttttgggatcaaaggtcaaggtatgttgggaaccctgacctacattaacatctcatccccccgactgtctccctgtccttcagacaaggctacatcctcagaagtccccatgctgagaatccacccttcctctactctcaacaaatcttctctacctttttcccttcctttttttgtttgtttgtttgttttttttttttgagatagatccttgctctgtcacccaggctaaagtgcagtggcatgatctcggctcacacaatctccacctttaagatcctcctacctcagcctcctgagtagctgggaccataggcacgcaccaccatgcctggcttattttttcttcgtatttttagtagagacagggttttaccatgttgcccaggttgatctcaaactcctggactcaagtgatctgcctaaagtgctggggttacaggcatgagccaccatgcccggcttcttctttaatggaatatttacacagagcccaccactttgccaggggttaagtatacaacagtgaagtagacagattgtttcctctcctcaaaaagctccagtatagcggagattcagatattcaagagtgcagagttctggtgagggcagtacaaggagctgtgagaacacagaaaaggtgtgctgtagacaggaacactagagtactaggtatagtagggacattcccagagaaaacagagactgtcccccaggagtgccccacgtccctctatcagcccatcctgatatttttcacctgaacctcatctcccttccaacccttccttatcctgtccaaggctaacctttcccctacactctcacaaactccccttccattgccttggggacctcacccacacagctccatgctaacttaagactttcccatccctagtagttgaacaattctgcttctttgtcaagttctgtgctatttcatggcatggtggaaaataatctggacttatgggtcaggcacagagggatcagatccccatactgcctctttactagctgtgaccctggacaagttgcctgtctgtcctttagttccgtcagcagttaaatggagagaatactactactgtgtaaagttgttgtcagaattacataaaataactgctaaaggggtgatatcatttggccaggagactcaagaatacctgaaccctctactcagccagactatctctccctgaaaagaagccagtggcaaggaaaaacactgttgaactggcgctttgacctcagacctccaaggacaaatctaatggttgggttaaaccatatgaagaaccccttttccctgggtgcaggcagccaagaagtccactcttctctcttgaatctgcactcgagactcagatgggatagctacaaaggccagggaagttcgatatggagcccatcagccagcaagcagagagcatctgctaatgtgtgctctttctgctgagattttcctcctagaaaacaaagcccaatccatatccttgaccttggctaattttagtagcaatatgctcttccttaaaggtgaaattggaagtgggaaaaggagggaatctgttgcctttcctaaagcccaccgtaaggtatatctgaaggcacttagtgtagaacattgcttaaaggtttgtttccctaccccattctcactcaacttctggaaggattaactgcacctgctgcctcctctttctcaccatttactcctgaagaatatctgcatccctgcccatcccaccccaccattccagtgaaactgctcagtgtcccggagaaatccaagggatacttctcagtccttaacatgacctctcggctacctctgcctcctttaaaaaagtataagtttgttatttttaattttggagacatcttttctttacataaaatatttcaagcatacaaaaaatactaggaataataagcattgatgtaccttctacccagctgaagaaataaaacatgagacacaattaaagcttctgcgggtcccttcccactccattctcttccttccccaggaagccactattctgcattatcctggcttcagtgttggcattcttatgccttgtttatatatgtttgagacagggtcttgctttgtcacccaggctgcagtgcagtggcacacacacgactcactgcaacctcaactccagcgctcaagcaatcctctcacctcagctccccaagtagctgggactacaagcacacactagcactcctgactaatttttgtatttttttgtagaaacagggtttaaccatgttgcccaagctggtctcaaactcctgagctcaagcaatcctccctccttggcctcccaaagtgctgggattacaggtgtgagccaccacacccgggcttgtttatgtattttcactacatatttatatatttattaaaaatatagtaccgctcttacatgtctttagactttacaaatggtgtcattatatgtacatgtatttrtgtatatgtgtatgtatattcttcatatttttttaatgtgtttttgagatttatctatattggtacatacagctgtaggtcattgatttttttttttaatggctgtataggatttcatacaccacatttaatctggttttttttttttttggtggacattcagcttgcctccaccattttgctattacaaacagttcatcagcaaacactcttgcatgtctcctggagcaagtgtgtgactttttcaacgctccacgcctaggagcatagttgtaggatcttagtgtmtgcacatcttcgtggttatttgatgttattaagatgctctccattgtggtgataccagtttactttatttttaggtctttgtgtacgttattttatatcttcctaacaactccacaaaatagraattactttcattttagagatgaggaaactaaagctcaaagaaaggaaatgatttatataaggtcacagagcacagccagtatttgactccaaagccaatacccttgctattcactatacatcatattatagtgctctcatgataccagagtttggaagagcagtccttattgccaaagccagagagaggccaaggagatgaggtctaaatagtgggcacaggtctgagagcacagaagtcatgggggtctttgctgaatggagtgcaggtgggcagagccaggctcagggagtaaagaggtgaggaggtaaagacagcctggcaaagagcaggattcaggattggcaatgtgagagggaggaagtgagggaaaggtgatgtcagataatgaggcacgtggtgagctcttcagttgctgggtgtctcctcatttgtttcctggtatctgctgggtgggagcacagagataagtacaaggtggtctctagctctgagcaggtactcccattccagggagactgcgtgcgccagcttccagggaaggccctggcctgggaatgcatgtcctggggcctgactacagagcctcagaaaaccagatgagcctcccagaagcctgggagagaagctgcgtgccagtgttagggacgggctcccggcagtgatatgcctgtctgtttcctgccatcacctcctttctcaggaagaaagtcagggcagtggcccaatacatccttgtgtccagagctctctccacttccactttcactctagcccctagggacttgtgtcttccagtaggattatcagtaaacattttatagaaaggtaagtgaccctgtaacagaaacctctctcctctgyctgcagacaatctgatcaaagccatcttgtcagtcaccaaagagtaccgcctgacccctgccttggacaggtgagccacacactgtgcagcctcctacccaccgctgcctggtggtgtgcagaggtgttgaggcccagctggccttccctggacatgggcagtttctccagcacatccacacatgcacatacagtacacacacagggtgggtggagcaggtaagtggaaccactccacctgacttgcacccccacgggctgtcagcacttggcaggacatcccagtcctcagataccagaggtttgagggtaagaactgaacacactggggctgggactagcccagcaatgggactgagggcctgggtggcgggggcaggtgaagggggcaaggcttaagtccagaaggcagtgacagctcccaaaccaacagaccctagagcaggaagccccagggtcagggatgggasaagcaagatgggtaagctctctagtggctgctgggagccttgagtcctagagcctcctgtcccgttccccttttcttgctttcctggtatagccccaagctcggcccacttttccctctcccctgaagcctgcctaaacaccactaccccttggggaacctttaccctagaatgtcatcttaccaaagctccctcctcaccacccacgcctggcacccaagcctttccatggccctgttttcctggggaagtgtcagggcctagatagagatgctggagagtctcagggcccagctacccattgtatggttcaggccttctctcagaaatgctgccagaagcccattggtcttcttcctctatcccagcctggtcctggacaagggcgtggggtcaagggccaaaggagcagggaaagagacctggtgggcagctctctgtacagaggtctccgcctctctcccctcagcctccgctgccgccgctgcatcatcgtgggcaatggaggcgttcttgccaacaagtctctggggtcacgaattgacgactatgacattgtggtgaggtgagctccccaaaatggcacctcgggtgagtgtcgtggccccaacccttagtcctgagcccattgagaactgtctgtctggctagttgggctggaggtcaacggaagcctcaagaactctgggttggagggctttggaacagacaactagcgggggcacctggggagaataggtccaggtgacctggactccctattctccatgcctgggatagtctggggtcatggtgccttcccaaacacaggcccaggctctgagtgggcctgctctctgtagactgaattcagcaccagtgaaaggctttgagaaggacgtgggcagcaaaacgacactgcgcatcacctaccccgagggygccatgcagcggcctgagcagtacgagcgcgattctctctttgtcctcgccggcttcaagtggcaggactttaagtggttgaaatacatcgtctacaaggagagagtggtaagctctcctggcaccagcttcttcccctcttgccctgggcttccgcaactcctargcaatcccgccccttgaatgcagcaaagaacgagtaagaaccttcaaaggaaacattaatgacccaaagccraaatcacccaatggcaaccagggggcaaagaggtcaggagattgcccgggttactggccaaactccaggagccaatatgcctgaaacctgctacctgcttccaggtgcccaggtgcagatcctttctcagccttctgtagccagaccccagcagccccaggggcccttccctggccttagatctcctggccaagggaagctctgtctctcaggccagccttcgtatcactcccaatctttctactttcctgccctgaccttgtagctgcctcccttgcaccctcttctcctctgtaaggtctctctggctctggtcttaggggtccctgccctctttctcagcctgggttctgcagggacagcagacccctcaacttgagagtgccagctcccaaacttagaagtcctggcctgtttccactttgtacttttaccactgacttatagttgaattcccaacctgccactgagtctgatcattgggaatgatcaggttctactgactgttctaagcaggtaagggtctgggcccatttctttagggagcttatgtggcagagtaaggtcaactgctctttaggagaccaccactgagttccctcccgagacctctacttcccagctctgggcctacagggacatccgtgaacttgtccaggcccactcccccacaaccagctgtcaccagcagccccaggggtggggtactgcagagctcagrccattcatcttctaatacccaagcctcttgctagaggaggatggtgacagacggccctctgcctacagtgagaagctgattgttctttccrgaggtttagagaagagttgggagtgggaacagcttcctttgcctttagggtctcagtgcaatttggtttaactccacagctctttcccaagcaaggccaagtacaggcagtgtcaagtaggtagcaagcaagagagaagacagaagtcaggtccagaaattcaggtaggtgggacagtggggaaggggaatccatttcagaaccagactggatgagacacctgggctccacagtgtccagtccacctccccaaaggggaggaaagggccaggcagyagagtgatgatttggccttagccaggcccaacttcaagcaggcccactgcccayacagaccaggtaaataacagcggttccaggagtaccctactgttttcagaaccctggggactgagacactagtgttttcagagtccctctctttgccttgagggcagtagaattagggtcacagatagacacttttaagggagaatggtaggaaatagagtctgtcctggtgaaccccagtgagcctaagggctgctgtctcactctggccttctgccatcctcctttcacatcgtttcctctgcccatgggcacctgtcacagcctccctcagggcaagagctcctaaggggcagagcttgatcccattggtttttacccttcagtgctcagtcaccataaatgatctggaattggctcaaacaccagttcctacttcccactggacagactgggaaaagccaggcagttcaaataaggccaggccaaaggggtgggtcagagcctgtcatgggtgttatcacatgttccttccaagaacaccaatgtcagttaattcaaggttcttaaaattcatccaagggagtaaggaaagraagaagaaaaggaaggaagccagctagagtcggagaactcactatactcaggctactcaggaagcagacagcagggccttgcttttcccaggaagctgaggagctctccgcctggcctggccttggcagcaggcagattcaaggtaccagcattgcaggacgaggcacaggcacaggctcactcttgatgacatctgtgtccgtcctggccacacccagggctctaggactagccttgtattggtgagaactcctacccagggtgggtgggggtgagtgggaagggaagacaggagacagggaggagtcctctgaattactgtgggccttccttggctccaaagtgaaagataatttggacctttagagtgagctgcyagaggaatgccggggttgcccgtggcctcacctctcccatctctcagagtggacctgcccaggccctttggctgcccaagggacctcttctttagtgtccttctccaccccaagcccaaggctaatgccttcccaggacctcacccatgctctgcctcacttccctggcatctgagacccaggaaaatgtgagaggctgcttctccaggtcccctcctgtctggtgccctagtcaccagcttgtcctgctcctgtagggatgtttccagtcatacagcctctgggcttctggagagctctctgcacctgtctggagcctcacctgcagaattctggcaggaggcagctctgtgttctggagccaaggcctggcagggcagggctggaacaggaattaggcctcagtcacagctgcttcctgccacttactacatgaggagtcttttaaagcctgtaactttctagtacccaggagtcctcataggatatgggaaggggcaggggggaagatgtaggaaaggacagccaaacaacccagagaacagcctgtgccagagctggccttaccttcttccatctgagaactctcctcttcatcatttgtggccatttgggtccctgactcactggacagtggcactgatatctccaaacaggttacaaaaaggctttgtctcccagatcccaggagccgtggccaagccagcaagcaggtgtaggagttcccagcaggctgtgtgctcagggcagctcagaagagcaccagyggatgggcaagcacagcacggaagctgaggcttggaggaagggtggagccagggacatgggggtgcagcctccagctccggtgcaggtcttctcagaggtgcctctgcagtcttccccaacacactcactcacttatcagctgtccatgaggtattctctttgcaggctctacactggcccctgggaatacaaagaggaattaagcactattcccaaccaaagtagctcacagtctagtgggagagagagtcccagagctagagttacagtacagtgtggaggctgctatgatgaggaaggcctaatgcagctctggggcaggtgggggacaaaagaaggcctcttggaggagtcactcctgagctggaccctgaaggaagagttaggagtgagtgggtgaaaggaattacaagcaaagggaacagcatgtgtagacccaagagaccacgctcccttcaggaaactggaggtgtgctgtgtggatcaagcatgagggtggtgtgtcagagtgtgctgcctaatgcctccaatgctgtggcctgtgcatcctcttcctggtattggatgaaggctggagacaccccatccactgtccagaggacggagccctggggtctggagaggacaggacatgtgagaggcagagcctcccatcyccatccctcaggccctgccctcttgcctctgccagcctcccccactgcgcctcagcaggccacagaagcccctgggaactgccttccaaccccgtttgctgcctcctcttcctcctcctcctccccactcctaaaaccagaaagccagcctcgctgctgagcacctctgactggtcatcaattcagtggggccctggggcctaggctgggtgggtgtggggtggtcccagccctgcagggggaagagagaggacagggctgggagtgggtccctggacagccttgacacagcacttaccctccagctgtacttcagtccctgggaggagagggaggagggcaggatctaagaggccagccaaggccccacattcaagcaaagggagactgagtccctgatcttagagtgacaacatggcttaagaggggaaaatggcttaggccttggagttacacagatttgggtttaagtttagactctcacttattagtgggctaccttaggcacatcacctaacctccttagatttagtgtcattgatacagtggatgagtagtgctgtgcatctttcagggtttttttaaaattarataagatgaaatctagaagcatctagcatagagaacttaactatgttctcagtctatagcaaatagtaatgttatgttattttatttttttatcactggtggtgattttgctgttagaaaaacccaattatcccagggagcaaagcatttttctgtcaggctgtaggacttgacctaggaggtgacccagaagcagggctcagaggccaggcctagaggagggagagacaaggagcctcctggtgaaaggcagcagggctggaccgtagggcagatggggccaccacatccccaaatgtaaggcctcttattggaccaggcccaaatggggattgaatgatgtccacctgcaccttcacctgttccctgttcaagcctgagagggatgcagagccttagcgtggactctgtcctgggagactcagtgcaggcctcctgctcccgagccagcattcaccacccagcccaggcttctcaccaagcctctgagaccagctcttcgaggattctccaccatttcctttgcggccatcaccagtggccgcagctctttctcccatgcctcttatccctgggagggccaggagatttcacgtcactgcctgttgccatatcttaaccattgctcctctacccccagataaaaatgctcaagaatggggactccctcagctcctcttcctcactgtcttctgtaagctcttggtcactgcctcataattattaccatgtcattctcctcctcctgctccccttcccgtcactcttcctcccgctccctgtcactcttcctcaccctccccctcctgctcctcnnnnnnnnnnnnnnnnnnnnctccctgcactcttttttttttttgaatgagttgctctgtcaccagacagagtgcagtgcacaatctcagctcgctgaaacctccgccaccccctccaggttcaagtgattctcctgcctccgcctcccaagtagctgagattacaggtgcctgccaccacgcctggctaatttttatatttttagtagagatggggtttcgccatgttggccaggctgctctcaaactcctgacctcaggtgatctgcctgcctcagcctcccaaagtgctggaattacaggtgtgagccactgcgcccggcccttgccactctttagcacccgccatgtactctccactctggctatatggacctatggatcctatttcacgcctctatgttctacctgtttccctacccatggatgtatgagatgctcctcttcttataagcctcaggagggcagcagctgtcttgttgatctctgtaagcccatcacctccagcagtgaggcatagttggtatacataagtaaataagcagatgtggaaactgaggcccagagtgcaacagtaccttcgaggagagtcaggattctaactccaaactcctgcctctcagtcaggctctttcctctcaactaggctacctcctttcattgccctggaaggtctttcttttaggttcagacccttgcatccttttgctctcttcttgcctctccagggcatctctttcctcttagccatgtttgatcttctttatgcagttccaagatcattctccttgataaagaaatgagaactgaacagtccctggcgctctgcctttcagttgcctgttggcatcacacggaccgccccaagccggctcttctttttgttcatcgcttttttccaaatatagctttcaaaaagttttctgaccctctcctcatagcacacatcaaaataaatcccaaacggactaaaaagcgaaatataaaaatacaaccaaagggaattttaaagtaaggatagaaatcaaatccctggagggaaagaactttcaagacacaagtgctagaagaaatcaaatttgataacatattagaatttcaagttaacacaaaaagactgccgcacaaccttgaaaaacatatttagaacatatggcaggcaaagggttattatgagagttaacaagaaagccattagaatcccagcagataatggacaggaaactgaacagatcacacagaaagaaagataactagtaaacaacagaaataggtttaaccttcctagcagtcagagaaattaatgtgaaggaaacagggtgccatttatcacctaccatgttttcaaataatgtgttaaattatcctacatgatgctgccaagagtgcagtgacagttgtatcaaaggctactggtcggagtaaacaaatagggaccagttttttggaaaggaaatggaacttggtaccgagagccatcacccagaggaaggaaaagtctgtgcacaaagatttttattgtagtgttactttatattttgtagtgttgtttgtaatagccaaacccaaatattacctaaggggtttttttatgtgagttatggtctcactacatgatggagtataaagcagtagcacagcagtcctgccgagggtgtgggcacctggaccagccagcacagctgctatccccaaaccttcagtgcaggcaggattggcaggtaaagcactggcctcagtgttaggaactgaagacaaatctcatcttctgccacaattcacatctttgagtttcattttcctcatctataaaatggaaatcatgaaagcttccctgcatagctacctgttattctgctataagaactagtaggacaawgcacaggacaacagtgacacactgtgckcatctgcaatgacagtcaccttctgagaagtgagaatgggcacaagaaatattgcctgcccactgggcagaaacccagaccacaggataaggagtgagagtgttggcgagagcaacagggcctgggcctaagggtacagatgccacctgatcaggagggtcctgccaccttgtttcttggccttcaggatacagatgaacctgcatgttttgggcatagagaacaacattggcaaagagcatggtgtatttagtgaattaaaaataattcagtataaccggggtgtggcatgggcatggtactgccctttgacctgagagaggcatctgccctgggccccactgtggtcctcctctggccacaacctttgccgtggagtgaagaggaatatgcagagccaagagggatgtgcccaccccaggtccatctgccttgagagaccactatcaggtaatggagacctcagaatttcttgccctaaaagtgagaagtccaagtccacttccatcttcttgagggcagaatgtaactctctgtgcgtaccctaagcccaaggagggtatttgcagaggctgtgagcagagcttggatgtgtggagtgaggaggagtctacacacatgcacagacttctttttttttttttgagacagggtcttactccgttgcccaggctggagtgtagtggcacgatctcagctcattgcagccttgacctccctgggctctggtaatcctcccacctcagtctccctagtaactggggctataggtgcacacccaccacacctgactaatatttctttttctttttyttttttttttgtagagatggggttttgcacaaggcttcttatggtatgggatgggaccggcgtgggaggtgggccagaccaccatggtccagcacaacagatctccagggtcaggattccaaattcaaacctgtccttctaggacatttttcaaggaaggatatatatagatatagatacatctatagatatagatatctatagacatatctgtagctatagatatctatagacatatctgtagctatagatatctatagatatatctgtagctatagatatctacagatatatctatagatatctatatctatagatatatctgtagctatagatannnnnnnnnnnnnnnnnnnncctcctgctcctcttcctgccactcttcccctgactcctcctcctcctcttcctgccacttttcctccccctcctcctgtttctcttcctaccactcttctttctcctcctcctgttcctcttcccgccactcttcctccccatcctcctgtttcctttcccgccacttttcttccacctcctcctgttcctcttcccaccactcttccccctcctcctcctgctcctctcccaccactctcccctctcctcctcctgctccccttcccgccactcttccccctcctcctcctgctcctcttcctgccactcttcctcctgttcctcttcccgccactcttcctcctcctcctgttcctcttcctgccactcttcctcctcctcctgctsytcttcctgccactcttccccctcctcctcctgctcctcttcccgccactcttcctcctcctgttcctctccttgctgcttttccttccttttgttctcctcttccttctgtcatcactatcattatcattatagctgtcacttattaagctcttcagtttatcagctttccttgaattcattcagttctcataatgaccctatagctaggtactgttattatccccatcctagagattaagaaactagggtacagagaggatatgttacttgtgtaaggtcacacaactagttaagtggtagagcctaattaaaactcagatctcactgcctcagggatcttcctaagaaataaatctgaccacctaccttcctggttagaatcctccatcagtcagctcctatctgccatggtctgtgaggatggtaagaactactgttaactcttctccatgccaggccctggacgatgtggtttatatgcatcatctcagccagccatctccacaaccctrcaaggcagatactatgagtagyagtaagcagtagagccgcattttggaccgaaggtgtttcactttaaccattgcactataacacctcccatttattcattgattcagcaaatccaaagcaatcaccaacatcatgtgcagtcccgttcttcaagcacagtctcactcactcgacagctccctttcccagtgctttccttcagatccagccagtccagtaccagggactgaatgtcacccatgggagagaagctacagccaaggtggtaacacatggtgtcaccttagtagcatctcagtgctgcttcccattcctgtgtcctgtccggggtccttgatcatctcagatctctaccctcatcatcttcaattccactgtacctccatcctattccaaagaaattgcatgtccagctgcacagggaaaataaaggttgtcaccagccaagaactctcggcttcctgcttcccatctacaaacttacctgcatccccattcatccctgcttcctcctctaccatccctcctgtgcctctgccattcatggtcagttctctcctgtcctggatgccatctcccttcaccttctcaggactgtcttcrttcctttgtctcctttctcacctctttgcygggtcctcctctcacatctatgaatgtatttggatctctttcaccttaaaaataaaagccctctctttagcttatgttcacctctcttcttttctctttcaagtttctgggaaaagtcatcgcctgtcccagtgtctccctgtttgccgtctgtttctcagcctctccatcctggcttccaaagccactctcacctggcagtgaccttctgattctaaatccagcagactcaacctctgccctccctttaaaggagcagcttgtcagcaagcatccagtgagcatttactgtgtagtgggcacagcgctgggttctagggatagcccctgattcttaaaactcatggccaaaaacccgggaagcatcctgattccaccattgcctttgccttccatattcgactcttcagtctccagatctttcattctcccttctaaatctgtctggcttggattatttcagcagctttctgtctgtttccctgcctccagtcaggtctctctccaatcccttctctatgtctgtattctaaagaatcctcctaaagtgaccaggtgcttcattcccctgctttggatccccatttcctagatgcagtggttctcaaagttccttctcataccagcagcaccagtatcacctggcaacttatcagatgtacatttttcagtgggggcctcaccttagagcttctgaatgagaaactctggttgggcccagcgttctcttttaataagccctctggatgatttgcgcaggctcaagctcaagaaccaatggcctgcaggataaaacttcaattccacagcacagaactccatgatctggccccttccaagccttcccttctccttgccactcttttttttttttttttgaaatggagtttgctctgtcacccagacaggagtgcagtggcacaatctcagctcgctgaaacctccgccaccccctccaggttcaagtgattctcctgcctccgcctcccaagtagctgagattacaggtgcctgccaccacgcctggctaatttttatatttttagtagagatggggtttcgccatgttggccaggctgctctcaaactcctgacctcaggtgatctgcctgcctcagcctcccaaagtgctggaattacaggtgtgagccactgcgcccggcccttgccactctttagcacccgccatgtactctccactctggctatatggacctatggatcctatttcacgcctctatgttctactgttccctatccatggatgtatgagagtctctctatagctcagaggcagagcgctgtgatcttgtagccacactcagcaggagcatagtgtaacatagtaatagcagtgtgaactgcgccagatgcacatacctcgagagagtcagatctactcaaactctgctctcagtcagctcttctctcactagctactcttcatgcccctggaagtcttcttatagatcagaccctgcatcctttgctctcttctgctctccaggcatctcttctctttagccatgtttgatcttctttatgcagttccaagatcattctcctgataagaatgagactgaacagtccctgcgctctgcctttcagtgcctgttgcatcacacggacgccccaagccgctcttcttttgttcatcgcttttttccaatatagctgtcaaaaaagtttttctgaccctctcctcatagcacacatcaaataatccaacgggactaaaagcgaatataaaatacaccaagggaattttaagtagatagaatcaatcctgaggaagacttcagacacagtctagagaatcaattgatacatatagattcaagttacacaaaagactgcgcacacctgaaaacatattagacatatgcaggcaagggtatatgagagtacagaagcccattagaatccagcagataatgacaggaactgacagatcacacagaagaagataactagtaacacagaataggggttacccttcctagcagtcagagaataatgtgaggaacagggtgccattatcacctaccatgtttcaataatgtgtttaattatcctacatgatgctgccaagagtgcagtgacagttgtatcaaaggctactggtcggagtaaacaaatagggaccagttttttggaaaggaaatggaacttggtaccgagagccatcacccagaggaaggaaaagtctgtgcacaaagatttttattgtagtgttacnnnnnnnnnnnnnnnnnnnnnnnnnnnnnnnnnnnnnnnnnnnnnnnnnnnnnnnnnnnnnnnnnnnnnnnnnnnnnnnnnnnnnnnnnnnnnnnnnnnnnnnnnnnnnnnnnnnnnnnnnnnnnnnnnnnnnnnnnnnnnnnnnnnnnnnnnnnnnnnnnnnnnnnnnnnnnnnnnnnnnnnnnnnnnnnnnnnnnnnnnnnnnnnnnnnnnnnnnnnnnnnnnnnnnnnnnnnnnnnnnnnnnnnnnnnnnnnnnnnnnnnnnnnnnnnnnnnnnnnnnnnnnnnnnnnnnnnnnnnnnnnnnnnnnnnnnnnnnnnnnnnnnnnnnnnnnnnnnnnnnnnnnnnnnnnnnnnnnnnnnnnnnnnnnnnnnnnnnnnnnnnnnnnnnnnnnnnnnnnnnnnnnnnnnnnnnnnnnnnnnnnnnnnnnnnnnnnnnnnnnnnnnnnnnnnnnnnnnnnnnnnnnnnnnnnnnnnnnnnnnnnnnnnnnnnnnnnnnnnnnnnnnnnnnnnnnnnnnnnnnnnnnnnnnnnnnnnnnnnnnnnnnnnnnnnnnnnnnnnnnnnnnnnnnnnnnnnnnnnnnnnnnnnnnnnnnnnnnnnnnnnnnnnnnnnnnnnnnnnnnnnnnnnnnnnnnnnnnnnnnnnnnnnnnnnnnnnnnnnnnnnnnnnnnnnnnnnnnnnnnnnnnnnnnnnnnnnnnnnnnnnnnnnnnnnnnnnnnnnnnnnnnnnnnnnnnnnnnnnnnnnnnnnnnnnnnnnnnnnnnnnnnnnnnnnnnnnnnnnnnnnnnnnnnnnnnnnnnnnnnnnnnnnnnnnnnnnnnnnnnnnnnnnnnnnnnnnnnnnnnnnnnnnnnnnnnnnnnnnnnnnnnnnnnnnnnnnnnnnnnnnnnnnnnnnnnnnnnnnnnnnnnnnnnnnnnnnnnnnnnnnnnnnnnnnnnnnnnnnnnnnnnnnnnnnnnnnnnnnnnnnnnnnnnnnnnnnnnnnnnnnnnnnnnnnnnnnnnnnnnnnnnnnnnnnnnnnnnnnnnnnnnnnnnnnnnnnnnnnnnnnnnnnnnnnnnnnnnnnnnnnnnnnnnnnnnnnnnnnnnnnnnnnnnnnnnnnnnnnnnnnnnnnnnnnnnnnnnnnnnnnnnnnnnnnnnnnnnnnnnnnnnnnnnnnnnnnnnnnnnnnnnnnnnnnnnnnnnnnnnnnnnnnnnnnnnnnnnnnnnnnnnnnnnnnnnnnnnnnnnnnnnnnnnnnnnnnnnnnnnnnnnnnnnnnnnnnnnnnnnnnnnnnnnnnnnnnnnnnnnnnnnnnnnnnnnnnnnnnnnnnnnnnnnnnnnnnnnnnnnnnnnnnnnnnnnnnnnnnnnnnnnnnnnnnnnnnnnnnnnnnnnnnnnnnnnnnnnnnnnnnnnnnnnnnnnnnnnnnnnnnnnnnnnnnnnnnnnnnnnnnnnnnnnnnnnnnnnnnnnnnnnnnnnnnnnnnnnnnnnnnnnnnnnnnnnnnnnnnnnnnnnnnnnnnnnnnnnnnnnnnnnnnnnnnnnnnnnnnnnnnnnnnnnnnnnnnnnnnnnnnnnnnnnnnnnnnnnnnnnnnnnnnnnnnnnnnnnnnnnnnnnnnnnnnnnnnnnnnnnnnnnnnnnnnnnnnnnnnnnnnnnnnnnnnnnnnnnnnnnnnnnnnnnnnnnnnnnnnnnnnnnnnnnnnnnnnnnnnnnnnnnnnnnnnnnnnnnnnnnnnnnnnnnnnnnnnnnnnnnnnnnnnnnnnnnnnnnnnnnnnnnnnnnnnnnnnnnnnnnnnnnnnnnnnnnnnnnnnnnnnnnnnnnnnnnnnnnnnnnnnnnnnnnnnnnnnnnnnnnnnnnnnnntctatagatatagatatagatatggatttttttttttttttagacaaggtctggctatgtcacccaggctggagtgcagtggtgcgatcttggctcactgcagcctctgccttctggggccctgccatcctcccacctcaggctcccaagtagctgggggctacaggtgcaccccaccatgactggctaatttttgtattttttcgtagagacgggttttcaccatattgcccaggctggtctcaaactcgtcagttcaagtgatctgcccacctcagcctcgcacggtgctagaatatatttaacagcttgatagcttgcctcataactttcagatatttagaattaaattttagacacgtgatatgtgtgtaatacgtccatttgtaattttgtccttggcccaacaatgttaggggttgaacctacatggatatggtggcagtggctggagatgaggctaggtgagcaggggacagatggtgaagggtcttaaaagccaaagtctcatcaaggagcctggaccttatcctgaggaccaataatagcagaagctaacaagagctgactttgtgccaaacatattatatgcatgacttcaaactgtcataacacaaaaacactataaaggagagctagtattactgcccttattttataggagaggatgatgagacttagaagagtaaagaacttgcttaggggtacagagttagagtagttgggggtgtgagggttcacaatcagacctgcactcttaattgtcaacacaagctgttgcagtgggcagtggaaagccactgaagattttaagcctgagaatgtcgagatcagatttgtgcagggatgtgaataaactgaagggaaagcaagagggagtcagagagagctgatggctgttagagtcaccccaggagagttggtggtccgtcctaaggcagtagcagcagggagcataggcgtggacacatctgcctactcttgctgtgaaagcctaccatggttaatctctattcccagacctgtgagcacaccaggaaacattctctcaggagcctggtggggaaagtgctttcttcccagatgttttccccattgctcctggatgttctgacaagagcagaacaggttgcatcagcaggagtytggcagcttcacacaggggagctgggtccagacttgactgaggcagggacattcctgaaggaggagggatttgacaaggaatgcagcccacagctggccttgaggagaagctggaccatgccgggccagcagcactggctggctttgtaggcctctgttgtgtcctgtggattggggaaatgagatgtgagaagccttgggccagatgtggacacttgcaggcagaggccttgtggaataggactgtgtgctggcagcagggctggcagtgtctccagcagcaggcagacctccccaccgggagccagggggaaaggctggctctcccattcaaatgcatgtacgtgtgcaggtatggatatgtgaatgtgttccggcctctccggtggctgatgttgctgaccacaccctccgcttcactctcctggcctctgtgacactcactataatcataataagtaagatttattgagcttgctgtataccagaccccgtgccagatgctgtaaaacgcacagcatctctaatccttacagctatctgggaagtaggtcttctcagccctattgtatgcacaaggaacttgaggcttaaagagaggacacaatgtgcccckggtcacagagatgtggagctgggattaagcctctgtttttcacactcccaaagctgcagtggtacacagatgttctgtgtatgtgcctgtggacgtttttctgagaagaggagttacagcttttttttttaggaaacaggctgaggttttgttggtacttgatatttttgtggctggggaaacacggaaatgcccaaaccatatcttggtcttactgtttctcctttccctgaaatctctgaggaaactacaccaggacagtggcagacaagaaagaataaaaggagcgctggactgtcgctgtgtcgggctcccagttctccagtgcagggctccctgggatcgtgacctaaaacagggctccttccccagggtcccaacatgactctcagcygctgctggccgagtaagaaccgagggcagtaagacctcagcgcagtgagccacgaagggcagaggcagaggtggcctgctccarggaggaggccctgcccagctcacccaccgccatgcagaggcagcaactcaggaagggctgcctttgtgggagagaattttcacctcacaccagtaatcgtgacacactcagtatcctcaaatctaagcagtcccatcaggcatttctcctcccaggaaagagtaaagatgagaagagacgtggcagctttcccctccccatcagatcgccaagggggttgagttaataagcgaatttcctgccatttgagatggtgattaaatccgggacttttagcatatggaacagaccaagagggattgtttcagagagggcatctcatgtgcagaaaaacaggttgtgaagtcaaacgcagctcagattctcaccagctgtgcgtgtaccctgacgagtcccctcaccattctgggccttagtcccctctgaaaaatgggacatgggcaccagagagactcctgagagctcccttagtgctcttagaggagacaggggaggtctcctttatctttgacccctaacccctcagacttccagaggcgggaactgcagcgatgatacaaatggtgtggtggaaagaatgccgttttggagtcaggacacctgggtttgaatccacttgcagccacttgcaggctgcttgaccttgaacgtatcgtgtcgtatcgtttcaccttgggatctgtacctgtgaagtgggtgaaagttaaagagataataaagtaacagtcgtgaaaccagcctggagcctcctcacacaggcccccagctgtgcccaatcctggttctccctgttcctcccgagcagcccctgtgctttctccctcctctttggtgtgtgcagggcaggcacaggcaggaaccccaggtgggaagctgttggggcctgctgggcctggagaagggacaggggctgtgctgtgctgtgcttggcacaggctggcacctgctgttcctgtcagtccacatctggcccacccaagaggggcttcccctcagctatgcctaaggtcttggccatttctccacccgtccgtttcctactgtctcccaccatccctccctttacctcccttacgcacaccccacttctggagacaggagcaggaaaaactggggtcggcttgctcagcctgactggggctgaaacagaagtttgccacaaggttccaatgtttgaactgacctttggaggacagacagtttgccagagaaagagatgttgccacagagttgggagccatgaggagggagtggctggaacagagacaatccaccaaaggagcagcagcggaagacgctgaagagctgctggtcactgggcgccctgggtggaggtcaggtctcctttagtaaccgtcactgatgcctctttgctgtctgtgctgtgccacgccctgggctacagaggtgaatcagatgtgagtccctgccctatggggctagtgtgcactcagcctggattggctcatttaattcttacaatagcttgtaagctaaatacgcgtgatgtccctggtttatccataaggaaatggtacattccttgcccaggatctgcacatggtgagtgagcagatctgaagttaaatcctaggaccaaggatctgaactccatattttaccacctcttgaaggtcagatgtcagttctgccttggggtggagggggygaggaaagacatgaaggagaggcagctgctgagtcttagaaaatggatgggtcatgtggatagaggtgggaaggatgttagagacaaggagcagcatcagcaaaagtgtggggcatgaattagcaagtggggacttcagatggactgagactgaaatgagagacagatgggttactggctaaaaggctcagctcttctttaggcagtggtgatctgatttgtacatggaaaatcattctggcagagagaaagtggtttgagaggctgggcgcagtggctcacgcctgtaatcccagcactttgggaggccgaggtgggcgggtcttctgaggtcaggagttggagaccagcctggccaacatggtgaaaccccatctctactaaaaataaaaaaattagctgggcatggtggcaggcacctgtaatcccagctactcaggaggctgaggcaggagaattgcttgaacccaagagatggaggttgcagtgagctgagatcatgccactggactccagcctggagtggtttgggagatacaggcagcccatcgtaggcactcattaatgctcgctgaataagtgaatagaattgtacaattaygtattgtgtaccatttatgtttcagttttatgtttcagttactctactgggctttggagtgttcagcagtcaaaaagacagacactgtaaatggccagtcattagaatagtccagatgaaagatgataagacctgccctggaagtggtggcagtaggtttgggatcaagggatggatctgtaccgttctaagcagatagactcgaacttgatgaccagcagcacaaggtaagatggactggaaaggtgtaggagaatctcaagtcagttcccaggttgctggtttggaagactggatggacagtagaggatagggaacaaggagaaggaagaggtctgggaaaactagaaacaatttagatatccaacaacagtgttggttacatacattatggtacatccataagacaaaattcctttttttttgagacaggacctttctctttcacccagactagagtgcagtggctcgatcacggctcactgcagcctagaattcctgaactcgagtgattcttccacctcagccccccgagtggctgggaccacagcctcatgcccagctaattattctatttcttgtaaagacattgtctcactatattgcccaggctggtattgaattcctgggctcaagtaatcctctcacctcagcctgccaaagtgctaggattacargcatgagccagccaccgcacctggcccaaaattcttagaagatatcattttgataactgtgacattcttttacataaatgtatcatttaatgaaacctctgttgtaaacttttggatttttttctgttttttcactttgtaagtaatactgtaataaagagctttttacaaaggtcttcattttgattatttttagaaggaaaattttgaggtcataagatataaacagctttgaggtctttgacacatagattgttttttagaagggctgtgccaaatttactcctatagcagtccaggagaattttccctcagcagactaccactagcaccaagatatagatacacaaatatacacatacacagattttaatggttaaaaaaataataacttgttagtttaatgtgcatttccttgtcattagtgagttaaatttttccatgcttattaaccttttgtttatgtgctttacccatttttatgaggcctcactgattcttcatgagtttttaaaatatgcatttcttactatttgtgacaaaatttttaccacttttttgtttccctctctatactatcttgcatatataatatataatatataatatatataatatataatatatataatatattatataatataatatatattatattatataatatattatgtattatatataatatattatattatataatatattacgtattatatataatatatatattatatattatattatatattatattatatataatatataatataatatataatataatatataatatatattatatatatatattttaaacagagtctcactctgtcattcacgctggagtacagtggtgccatctcggcccactgcgacctctgtccccaggttcaagcgatcctcccacctcagcctccccaagtagctgggactacaggtgtacaccaccacacctggctaatttttgtattttttggtagaaacggggtttcaccatgttggccaggctggtcttgaactcctgacctccagtgatctgcccctcggcctcccaaagtgctgggattacaggtgtgaaccaccacgcccagccttattttgcgtatatttttgatgtgccaaagcacttaaaaatgtttatgaagtcaaaacgtgtcagtcaaaacatgtctttttatttcttccattgcattaatgtatagataattaagtgataaaatagacatctaaatttttttctttctctcttttttttttttttttttttaagagagggtctcactctgtcacccaggctggagtgtgcagtggcgtgatgatgacccactgtagctgccgcctccagggctccggcagtcctcccacctcagcctccgatggcgtgagactacaggcacacgccaccatgctctgctcatttttgtattttctatagagacagggtttctccacattgcccaagctgttcttgaactcctgggctcaagcaatccacctgcctcagcctcccaaagggctaggattacaggcatgagccaccacgcccagcctagatttccctttttttgttttttaaacatttacttattttgtatatggtgtgaggagagaaagtaaatggatcttcttcccaaatggaaaattttccaatctcatttgttcccataacctatacctgtgttgaactgcttctaggtgaccctgtttcactgatcttggttttgaatcatatatatatatataattgttgtaataagtgcaaacccataatatactgtaatacctaatttttaatttgagggtgttatgtttacctgataaatcttttggatgggtttttagaatccatttgataaatctcaaaacatcctactgagatttttttcttagaattatgttaaacctgtacattaatctgggaggagctggcattggagccttcccatccaggaatatgattttgtctttcctattttttaagtcatctctttatatcagtaaaaggttatagttttcctcctatagttctcacatatttcttatgtttattgctcaatacttgacttttttgttacgattgcaaataagatctttttgttatatctgatgactgtttcctattgctgcagtaaattattttatccattctaagtttagttgattcttttaggttttctttcttttctttcctttctttgtttyttttttttttttttttttttttttttgagacagagtctcgctctgtcgcccaggctggagtgcagtggtgcaatgtcggctcactgcaacctccacctcccaggttcaagcaattctcctgcctcagcctcccaagtagctgagattacaggcaactgacaccatgcctggctaattttttgtatttttagtagagatggagttttgccatgttggccaggctggtcttgaactcctaacctcaggtgatccacccgccttggcctcccaaagtgctgggattacaggcatgagccactgcgcctggctgattcttttaggttttctatgcaaataacagttcggttggagcccgtggtttggcagtgccgccagtctgcagggttggtttgtgacctccagcagtgctcaggagcccagctgtaaaggtagaaaaagaggatgtatgggttgatcccaagttcgggatttccctagactagggcaatagaaggacaaggggcagagtactggaggagctcacaagagagtagctgatgtaatatacttcagggtctagacaaggaggggtggacgcactgaacagtaagggctggggagctaaaggcctctgtgttgtggagagggaggaagagagagacttgaaaggaggggaagctgtgccccagaatggacactgggatgtcggatttcagaggtgatgcctttctagtacagtgcagagaccctccggtaagaatgatcccgttttatggttaaagaaacaggcttggagagcttgttgcccagtcacccaactctagtcaacagcagtgttggtctgctatactctacttgctcacgctctgtctccatttttcaggtccactctagaacagtcgatggagagagccaggagagagcagcaagggaagtgggagcacaggagggcagacaggagagagggcaggcacctcccagcccctcagctgctgcagatagggaggcagggcagctgcactgctgggtcttcttattggcccaggagccccctcaggccacagcagcacacccacagcatcccacatcctgtgcctgcccgacgactcccttcgtatcctcctctgttacacactggagccccaccacacgctctcttcaccatcattccccttgtccctgtcacacactccatttccccaaacacagatgggcttcctacaccacaggccctgggttccccattaaacgcctcatgctcccgcctcactgtccctacttggggtccctgccactcccctaggctcatcccttgctgtgtgcctcgttgaggcccgcttttgctgtgtccacagagtgcatcggatggcttctggaaatctgtggccactcgagtgcccaaggagccccctgagattcgaatcctcaacccatatttcatccaggaggccgccttcaccctcattggcctgcccttcaacaatggcctcatgggccggggggtgagatatctgggccctgggagagggaggaggaaagctgggtcagaagtgccttggaaggaagggtgggtggtgggtggggyagtgcttctgcaaaatagctttctggggaagagggctcagtccttgggcatggaggctagctctagggagcttggctgaagtctcagctgtcccagccctccagctgaactctgcatgccttctctcacccctgcccccgtcttctagaacatccctacccttggcagtgtggcagtgaccatggcactacacggctgtgacgaggtggcagtcgcaggatttggctatgacatgagcacacccaacgcacccctgcactactatgagaccgttcgcatggcagccatcaaagaggttcggggctgggtrtgggggcaatccctgggtggggatgasggggaggtgcataaatgagtagtaaagggaggagccagtggctggtctggctgcccagaactccccagaaggtcctgacaccaagcatcctacgtgccctctccacagcctcccactgaacccagggccttctccctgaactttccttccaagggactctccgtgccctggtcctgcacctccctccccctcgctgcattccccagtcaggaacactagtctagcaccagctcagccatcctctctactgcagttcctgccttcccccagaggacgctattttccctcaaaaaacccacaactgaacactgcctctgggtctcaggacttctccatatctcttccacccttccccacagccaagcactgcagctcttcataccccgaattgcttcccaaacatccgtatgtagggtacattacaggtctccagcctgtcagccagccttttctggcatttctccctccctagccaagaccccatgtggaaaatctgaacccttctgaactccgcttgccacacttctgctttgaccaccagccttccactgatcccagcctgaaacctggaaatcttgggccagtkcttcaacagcttctctgctgctacatctgggtgatgggaggttgttggagggaacctcccatctgtgcagattcctgtttctgtaagtctgggggctctggtctcagccctcattcctgcttatcagtcttcttatctatccttctccatcatccccctccactattccagagccttccatgccccaaaagctcctccctcttccagtgaagaaactgaagccacagaggggactctgatctgtcgggctctgcactgtactcccacttggcccttcaccccttgcagcctggctcccctcacacctgacccagctcccatcaaggtcaccacctcaaggtggccaattccagtggacacaacgtcatctttcctgatctctcagaaacacttttcrtgttggccactccttcttctttgaacttctgagtcagtaatttccaacattcctcttatttcactcaccattctctcacattctctttctcagcatcatcaattctgatctacgccttaaaattcatcatagctgggcacagtggctcatgcctataatcccagcactttgggaggccaaggcaggggtattgcttgagcccaggagtttgagagcagcctgggcaacatggtgaaaccccatctctactaaaaataggaaaaattggctgggcgcggtggctcacgcaggtaatcccagcactttaggaggccaaggtgggcggatcccccgaggtcaggagttcaagaccagcctggccaatatggggaaaccctgtctctactaaaaatacaaaaattagccaggcgtggtggtgggcacctgtgatcccatcaactcaggaggctgaggcagaagaatcacttgaacccaggaggcagaggttgcagtgagccaagatcacaccactgcactccagcctgggcaacaaaatgagactccgtctcaaaaaagaaaaataggaggcagggcatggtggctcacgcctgtaatccccgcactttgggaggccgaggcgggtggatcacctaaggtcaggagtttgagaccagcctggccaataggtgaagccctgtctgtactaaaaatacaaaaattagccggacatggtggtggacaactgtagtcccagctactcgggagactgagacaggagaattgcttgaacctgggaggtggaggttgcagtgagccgagatcatgccactgcactccagcctgggcgacagagcaagactgtctcaaaaaagaaaaaaaaaaaaaaaaggccaggcatggtggctcatgcctgtaatcccagcactttgggaggccgaggtgggtggatcacaaggtcagaagatcgagaccatcctggctaacacggtgaaaccgcatctctactaaaaatacaaaaaattagccgggcatggtggcaggtgcctgtagtcccagctgaggaaggagaatggtgtgaacccaggaggtggagcttgcagtgaaccgagatcacaccactgcactctagcctgggtgacagagcaagactccgtctcaaaaaaaagaaaagaaaaattggaaaagttgtctgggagcgctggtgtgcgcatgtagtccctgctgcttgggagactgaggtgggaggatcacttgagcccaggaagtcaaggctgcagtgagccatgattgtgccactgcactccagcctgggtgacagtaagaccctgtctcaaaaaaaaaaaaaaaaagcactagccaaggctccatctcagacagccttctcttctcactctgcatgttctctaggagatttacatccctgtccatgacttcaggtaccacctatattgtatcaggcttttttggttcttagccccttcagactgctataacagaatgccatagtctgggtggcttttaaacaacagaaattcatatcccacagtcctggaggctgggaagtgcaagatcaaggtgcgggaagattcagtatctggtcaggacccaccagagaggtggttcatagacagctgtcttcttgctttcctcatatgatggaagaggcaaggcagctctcctgagtctctctcttttctttttgagatagggtttcactctgttgcccaagctggagtgcagtggtgtgatgatagctcactgtagccataaacccctgggctcaagtgatcctcccacctcagcctccctagtagcagactgcaggtgtgtgccatcacacctggctaattttttttattttttgtagggatgagattttgctatgttgcccaagctggtcttgaactcctggcctcaaacgatcctcctgccttggcctctcaaagcgctgggattataggcatgagtcactgcacctggccctgagtcttataagggcactaatcccattcatgagagctctgccctcatgacctgatcacctccccaaaggcccccacctccaaattccattacattgggggttaggtttcagtatatgaattcatggggaggacataaacattcagtctacagcaggtttattccaactacctcaagtgattgggagttatttcaaggatatataaggcacttggaaatctcataggaagctagaaacagccttccagctgggcctcctgttgtctcggatagggttcaggagtgagaagctcattgtgggtctgggacagttctagaactgcctcaccatcaccgtggccccgaaagtcttccatccctgccatgcttcaygtgccttcttgctgctttgtccacagccagcgcccacttcagattgccctcacagcttttatcagcctcctggcttctacgtttacttatatctttggtcttttacaaatgccttttatgtaaactttatgtaaagttgtatgcagagggtgagagccatagacgtgggcgatggccaaatcgcaatgggctttctgtgccacggaaggagtttgcacattatttagaaggcagtggggagacatgggtgagtttgaggccttacattagcatgtagtggatcactgtggctgcagaatgaaggagagggggcgaggcaggaacagaacctagttgggagttgctgcactttgggcaagagatggtaactcctgaaccagatctttggctgagacaatgagaggtgatgagagaggcgatgagccagatcttyggctaaggcgattagtcagaggcaagaagtccaggctggaagtataaggtgatgagacagactcaagaaataggattttaactcagtaagacctagggattgccttggtgcaggaatgaggtagggcactgccttccctgcagccctctctgatggagtcttttcatttgcttccacctgccatatctccattgtccctccattacatgtaaaacctcactggctctgaggctcccagcatctgctgcactacactccctgtagagtgcttaagagtgtggcttcttggccgggcacagtagctcatgcctgtaatcccagcactttgggaagctgaggcgggtggatcacctggggtcaggagttcgagaccagcctggctaacatggtgaaaccccgtctctgctaaaaatacaaaaattagccaggcgtggtggtgcatgcctgtaatcccagctactccagaggctgaagcaggagaattgcttgagcccaggagggctcaagtggagattgcagtgagccaagatagctctactgcactctagcctgggtgacagaacaagactgtgtctcaaaaaaaaaaaaaaaaaaaaaaagagtgtagcttctcaaatcataaaagatgacttcaggaccttggttcaggggctgactctagacctgcatttccttatctatgaaagggacagtaacagcacctacctcctagggtttggaaaggaccggatgtgatcatgtgtaaaaaaggcctgccacgtagtaagcactcagaaatcttagccattatgattaatattttacccctacttgccactgttatttaccaatccccagaagaggattcactgagaatgttggtgcccgggtttagaatccctctgttacctggggtgtctcacawggaccattcaacaccttggcttctcctcacttcacctgcatttgccttgatcagctcactctgcaggcccagcaggagtgtgtgggatgtggagacacatggaccaaggattgaatgccggggatatggaagggatgtcaagggaatccwtaaaggagacagaggaatcaggaaggtgccacatcgtggaggccaaaggagcagcattccaggaagagcatctacaaygtggtgctgggaaacccagtaagatgagggctgagaggtggccgtcggatgtagctgttaggagttaactgctgactgtggtgagaacagtttcaaaggaatagtggagtggaagccagattgcagtagtgaacagtgagtagacggcacctacatctgtggttagagaccacagatgttgctcgtggtaagggatctctcaggaygcttggaagagaagggagtagagagactgggcagtagctagaggatgacgtggcttcatacgggaatctgtcacacagcagagaagtccaggctggaagtatagatctgtgagttgttagcacagccgcttcttcagatataaggatgagatttcccagagagaggacagagagtgagaagcgcggctcatcctggcaggacccttgaacgtggatacttaacggttgggcgaggagccaaagaaaaagagcttctggccgggcgcggtccctcacgcctgtaatcccagcactttgggaggccaaggcggatggatcatctgaggtcgggagttccgagaccagcctgaccaacatggagaaaccctgtctctactgaaaatacaaaattagccaggtgtggtggcgcatgcctgtaatcccagctactcgggaggctggggcaggagaatcgcttgaactcgggaggcagaggttgcagtgagccgaggttgcagtgagccgagattgcaccattgcactccagcctcggcaacaagagtgaaactccgtctcaaaaaaaaaataaaagcttctgagagtgtggactgtgacatgggatggacatcaatactcagaatcaagggccctggtaaggctggagaccccaggatgaccagaatcctccaccagccgcggccagttcaaagctcaggtgaactcagaagttgtctgcatagaattaggaaaagagcaccagagaggtggcattgccggatccaagagagctacaccccagggctgactttcttgtttacttttttatgatggaaattgtcaagcatattacgagtacagaggataatatcatgaactcccacgttcctgccccccaccttccacaggcatcaacaggcggccaacattgttccatctcttctttgtctcatgctcccactccactgattcaaacatgtctcagataccatatatccctccaaccataaatacttcattcaggccgggcgtggtggctcacgcctgtaatctcagcactttgggaggccgatgcaggtggatcacctgaggtcgggagttcgagactagcctgcccaacatggcgaaatcctgtctctactaaaaatacaaattagccagtggtggtgcgtgcctgtaatcccagctactcaggaggctgaggcaggagaattgcttgaacccgggaggcagaggttgtagtgagccaagatcgcaccattgcactccagcctgggcaacaagagtaaaactccatctcaaaaacaaaaaccaaaccaaaacaaaaaacttcattcattttctctaaaagataaggactattttttaaattattacacctaaaaacatgaacagtaattccttaatatcatcaaatgtccagtcctctgctgaycttttaaccctcartgactcctagtgggtgctgttgaccctgacccatcaaattcgttactacttctccagaggagtgatgaggacgagggataagtaaagaggcaaacgagtttccacatctgcttgaatcctggccttgtcwttcctccaagtctctgttttccctgtaaaacctaatttcattcaacaaatattgaggcacctactctgtgcctaacagtccctaccctcaaagagagacagtgagccagatgcttaagtcttcaaagaatggggatgagtcgcccagggatctgcaatgaggaggggcaagtgcagatggcagagtataatgacaggagccttgaaggggccggagggctttagggagtctgagggacaacggggtgtaaggaagaygcttcccgccttcagaggctgtggagtgtggaatgtgagggaagaaacggtcaccacttgagagggggtatgggggcactctccttcagggcagctgggtttgtgattagcacaagaggttgaagggaatgctcagagaagaggaatattgggaatttggctgatgactgcgggaatttggctgatgactacctgagtttcagatgtaaaagatttggaaggtggagaaggttgactggatcagaataagggctagacagagcaagccataagttctttgtaaaaaattcatttatttattatttttcaaaagatggggtttctatatgttgcccaggtggactaagctcaagtgatcctcctgcctcagcctcccaagtagttgggactacaggcacagggcactgcatccagctcacttctcagcaccactaaatagtggctgttaacagttattggccgggcacgatggctcacacctgtaatcccaacactttgggaggctgaggctggtggatcacaaggtcaggagatagagaccatcctggccaacatggtgaaaccccatctctactacaaatacaaaaaattagccaggtgtggtggcaggcacctgtagttccagctactcagatgactgaggcaggagaatcccttgaacccggggggcggaggttgcagtgagccaagatcgtgccactgcactccagcctgggcaacagagcaagacaccatctgaaaaaaaaaacaaaaacatttatggtggtccgggcacggtggctcatgcctgtaatcccagcactttgggaggctgaggcaggtggatcacctgaggtcaggagttcaaaaccagcctgaccaacatggtgaaacccccatctctactaaaaatacaaaattagctgggtgtggtggtgcactcctgtagtcccagctactcaggtggctgaggcaggagaatcgcttgaacctgggaggcagaggttgcagtgagctgagatcacaccactgcacaccagcctgggcaacaagagcgaaactctgtctcaaaaataaataaatagataaaaaataaacagttatggtgaagctcaatgctgacaaacgcaacagagaggtcacttggggacaaactctgataaggctgctgtcattcagcccttcattcattaaatcaagcctttttcatcaaagttttctggtgagagtcctggggttaggaaaggaccctatcccaggtacagtcttccccagaagcctcttctagtaattttgaaatatatgacattattattaactatagtcaaatgtgctcaccataaaaaattggtaagtaggtgaggttggcttgatttaattattccacaatgtatacatctatcaaaacatcacattctaccccaaaaatatgtacaattctttcaattaaaaaattagttttaattattatttttttttttttgagacagaatctctctctgttgcccaggctggagtgcagtggcgcgatctcggctcactgcaacctctgcctcccgggttcaagcgattctcctgcctcagcctcctgagtagctgggattataggcgctaccatcacacccagctaatttttgtatttttagtagaaacagggtttcaccatgttggtcaggctggtttgaactcctgacctcgtgatccacccgcctcggcctcccaaagtgctgggattacaggcgtgagccaccgcgcctggcctatttttaattttctaaaaaagatttgccatctctccgcaggccccatagctcctctgatctgggaggcaggatttcatccgccgcccccaggcctggagagtagattgcatcaggccagggagtgactcagccaccccttgctgttggacttcagtgactcacactgcctgcccgcagggtgtctataacctaggtgcttcatgacaagaagtggcttgaagtctgtgggaacaaggtccttccgccagcactgaggagggaggttgggaagcttaacggttttcctgggacgaggaaaggggtatgaaggttcttttttccctgtcttgggaagggaggaggatgagctgtggcactcctagagcagggtcatcattaccgtgtagacacaactgattaccagtatctgccttcaggtttccacagtcacggagtattggagagtggtgacgaagaaggcaccgagccctggaaggggcagtaaaggtttgagcaaaggcccaactgatcayttcatctctcctttcagtcctggacgcacaatatccagcgagagaaagagtttctgcggaagctggtgaaagctcgcgtcatcactgatctaagcagtggcatctgagtgggcccagcacatggccatagaggcccaggcaccaccaggagcagcagccagcaccacctacacaggagtcttcagacccagagaaggacggtgccaagggccccaggggcagcaaggccttggtggagcagccagagctgtgcctgctcagcagccagtctcagagaccagcactcagcctcattcagcatgggtccttgatgccagagggccagcaggctcctggctgtgcccagcaggcccagcatgcaggtggtgggacactgggcagcaaggctgctgccggaatcacttctccartcagtgtttggtgtattaycattttgtgaatttgggtaggggggagggtagggataatttatttttaaataaggttggagatgtcaagttgggttcacttgccatgcaggaagaggcccactagagggcccatcaggcagtgttacctgttagctccctgtggggcaggagtgccaggaccagcctgtaccttgctgtggggctacaggatggtgggcaggatctcaagccagccccctccagctcatgacactgtttggcctttcttggggagaaggcggggtattcccactcaccagccctagctgtcccatgggraaaccctggagccatcccttyggagccaacaagaccgccccagggctatagcagaaagaactttaaagctcaggagggtgacgcccagctccgcctgctgggaagagctcccctccacagctgcagctgatscataggactaccgcaggcccggactcaccaacttgccacatgttytaggtttcagcaacaagactgccaggtggttggsttctgcctttagcctggaccaaagggaagtgaggcccaaggagcttacccaagctgtggcagccrtcccaggccacccccatggaagcaataaagctcttccctgarcctggcctctttttgccttctctgacttycctggaagaaacaggaacctaaagccttagcaactatgccaaaccctcgggccctctctccagtccacagagtcctgggtccctttcacttcttgtgtcaatgcaggacctaggtagccatccagaggcctctggagcatctcctgtatcctctttgctttgagaccagaggtttcagggcacactcttagaggagacagaggcacaggactggagccctaggacattgccttggggtgccacagccccacctctggaaggacagatattcctgcaagcacaggaaagatatactgctgagcccctgcagcaagcagaggctcacagacctaccctactactgacactcccgtccctctgggaaggacatgccccagccccaatcattagcacagaggcacaccctctcccttcagccctgctctaggtatcctctgtcatactttagaaaagatatcacgtcgccttcttaagagtcctagagtctgatccctctcttccccagcatccccaggcaggcctgagaatggacagaccagactgtcgcctgcacttgaggccatgaagtgagctttctgtcacacactgccactgtggcaggcagtaagtggggtggccggctcctgctcctctctcctgcccaccccaatccaagactccaggcagccctgggctgccctcccactggtgagccctaaggctggagtcccggccatcccagggaccagcagcctcccacatgctccttcccactgtggccggccttaggcagaagcctcctgggctaggggggtaagggaggccctgactgagggacaggtcaacccagaaaccccctccatttctaccggaaataaggccactaccatgcacatgttcctgcctggatggtgccccgtggagttgtacagggcataggctgaatggccataagtggtgtccctggctgaaaaagccccaaggcaggtgccccaactgagcagccggttgtgggaggtgacagagcagactgctccctgcttggcctcctatcccagggggctcctggcacgcctgcagcagccccaccacctccagcagcagttctctgtggtctgacttctagtcctcaccaccgcggaaaactactttcacaccagctatggttctgagccctggccatgcaccagaatcacctgtgcaatttgaaaactgcacatgtccaccctgaaagtctgatttgggtctgggttgaggcccggatgtgggtagtttttaaaggtccctagtggttcagaagcatagccagggtacagctggtccacacacatccccagcactctcatccctgaccacagcttccaattgccagttggttgacaattcccaaattgcctttgccagcgcagctctctctgcttccttccaggctacaaattcaccggcttcctgaacatttccacttggataatccacaggcccttccaactcaacatgtccaacaccgaactcatgagcccctgcctttcctcccaggagccgggatgtacccctcccccaggtcaccccgccaaaggcacacttttgcagggtctacctacctcctcaccctatccagtcaggcactaatgaattttcaaaattgcgtgttccagattggggcctggcagccccacgctcccctcatgccctgcatcagacctcatcctctttccacagcagcctccacctttctctccaaccccatcctctttactacagccagagtcatccacaaaaaatgcctgtctgattacaccattctgctcaaaaccctcccatggtccccagtgttaggatctttccatccatgttactcacccagccctcaacccacctgccaaattgccataattaggcatctgaaatgctgccctccagctacctacttcaagactcagctcagatgttcctcctctgtgacccctgccttcagccctcagtacccacttctgccaacactgcccctgctgtgccccagtgactcccgtgtttgcaagtgtgtccgtactccaagccctaagcagcacaggaggtgagctgtggggagactagagcagagtcagatcctgaaagctgcgcagaggctaagcaacccaacaaggcaggtgaactggccgctgagagaagaatcgggtggagcagagagcagctgctgcagggcagacagccggacccccaaatctgcacgtaccagcagtcagccgccccacgcagggaccggcttacccctcgctccccgccctcactcactttctcccgccctcggcccggcctcccagctctctacttcgcgwgtctacaaactcaactcccggtttccgtgcctctccaccgctcgagttctctactctccatatccgaggggcccctcccagcatctacccccctcccaacctcgggggacctagccaagctaggggggactggatccgacgggtggagcagccaggtgagccccgaaaggtggggcggggcaggggcgctcccagccccaccccgggatctggtgacgctggggctggaatttgacaccggacggctgcggcggcgggcaggaggctgctgagggatggagttgggcccggcccccagacaaggcccgggggctccgccagcagcaggtccctcgggccccagccctcgctgccacccgggcctggagccccacacccgaggtaagccagcccacttgcctgtttctggtcccagccctggatggacgctcttgggctgggggagaggacaggaccacccccctcctctcctttcttgcatcctccctctcttgggccctcggcacagttctccgcccctcccagcccctcagtccctcttgtcgcttgttggactgtgctggccttgccggcccactgtaatgtgaggctcccgctgccgctacagggtgcagactggctgccaaggccacacttttggctaaaagaggcactgccaggtgtacagtcctgggcatgcgctgtttgagcttcgggggagagcccagcactggtccccggaaaggtgcctagaagaacaaggtgcaggaccccgtggtgagtagcrggctggtggatggggaggcaagggccagagaaccaaatggccctagaccacaaggaggtaggaggcagggcctgagctgccctcaagagacctgctcccgggctccccctagcgcagagggctcctaaggctgccctgcctgcctttccctccatcacggacaacagtcactggcctggctcggaggccttgattccacttagccaagaggcacacaccaggacctggaggacaaccccgggaaggcctgggggtctgttccacaggtgtgcaggcattctgtgtgctaaaggatggggatgagggtggtagctgggacccaagaggaggctggctaatgaggacttacgaaggctctagggccccaaaagggtgtttgggagtgctagcagtgggagctcaggaaggctggctgggatcaggaacgatggctcaagggggaaacttctaggagcatgactaggctgccagatccataggaggctgggagggggacagacctagaccagctcccagggtggctcagctctcagagaccaggctggtatggaagcctagctggccctcctgggagtggctcaggcctgagwgtagctgaggggatggaaaagcccaccctgcttggaatctgcaggcttggcagaytctgcccccttgtggccacaggaagccatgacccaggccccatgttttcagagggcccattagctcccaccatcccccggctctgtggtcatcgagggacacctatagtcagaggagagaactcaggtggctctgggtccagaacacagttcacagaggggcgaggtgaagcagctctgggtgggcagcacaggctgaggcttggggctcactatcattagataactcttagagtgaccagctagcaccctaattcttctccagccctcagcttcctctccggcagcctggggtgaaggcctctgtaggaccaagtgtgtccagctataactccttccagccacttctggcatctccagacctacaacgcagagcaggaaggttctgggaaaagaggacccctctctcccctccagctgtgtgaccttgtaaccttagacaacctctgagcttctctgagccttgtttgctcatctggaaaaaggggattaaaccatttacctcatggagttgtgaaagaatagctgcaaagcacctaacacatagtaaggttcccagtgcagctacttctgctgggttgagtctagctgtgtaggccccttgttcctcacctggagaaactggggtggcaggccggtcccccacaaaagataactcatctcttaatttgcaagctgcctcaacaggagggtgggggaacagctcaacaatggctgatgggcgctcctggtgttgatagagatggaacttggacttggaggcctctccacgctgtcccactgcccctggcctaggcrgcaggtgagtggttctcccagtgactcctacctggtactgaggaaaggcggcttgactggtgagggagagcagggcttggcttgggcagcggttaggtgtgggagggaaaatggtcagggagggaccaggtgaatgggaggaggagcgggacttctctgaatggtcggtgcactcaggtgattcctcccctgggctcccagaggcagcaaacccattatactggaacctaggcccttcctgagtttcccctccacacagctaggagcccatgcccggcctgatctcagcccgaggacagcccctccttgaggtccttcctccccaagcccacctgggtgccctctttctccctgaggctccacttggtctctccgcgcagcctgccctgtggcccaccctggccgctctggctctgctgagcagcgtcgcagaggcctccctgggctccgcgccccgcagccctgccccccgcgaaggccccccgcctgtcctggcgtcccccgccggccacctgccgggtaggtgagagggcgagggggcggggcggggctggcccgggacaccgcgcgtgactgggtctcattccagggggacgcacggcccgctggtgcagtggaagagcccggcggccgccgccgcagccttctcggcccgcgcccccgccgcctgcacccccatctgctcttccccgcgggggccgcgcggcgcgggctgggggcccgggcagccgcgctcgggcagcgggggcgcggggctgccgcctgcgctcgcagctggtgccggtgcgcgcgctcggcctgggccaccgctccgacgagctggtgcgtttccgcttctgcagcggctcctgccgccgcgcgcgctctccacacgacctcagcctggccagcctactgggcgccggggccctgcgaccgcccccgggctcccggcccgtcagccagccctgctgccgacccacgcgctacgaagcggtctccttcatggacgtcaacagcacctggagaaccgtggaccgcctctccgccaccgcctgcggctgcctgggctgagggctcgctccagggctttgcagactggacccttaccggtggctcttcctgcctgggaccctcccgcagagtcccactagccagcggcctcagccagggacgaaggcctcaaagctgagaggcccctgccggtgggtgatggatatcatccccgaacaggtgaagggacaactgactagcagccccagagccctcaccctgcggatcccagcctaaaagacaccagagacctcagctatggagcccttcggacccacttctcacagactctggcactggccaggcctcgaacctgggacccctcctctgatgaacactacagtggctgaggcatcagcccccgcccaggccctgtagggacagcatttgaaggacacatattgcagttgctt

SEQ ID NO: 95265 - DNA, 13433 bp, Homo sapiens
aggagaatctcttaaacctgggaggtggaggttgcagtgagccaaaatcacaccattgcactccagcctgggcgacagagcaagactccgaggaaggaaggaaggaaggaaggaaggaaggaaggaaggaaggaaggaaggaagggaggaaggaaagaaagaaggaaggaaaggaaggaagggagggagggagggaaggaggagggaaggaaggaaggaaggaagagggaaggaaggaaggaaggaaggaaggaaggagggaaatacacatataaaatataagctccatttttaaaagtttggtttttttgggttttttttggtaacaaatagctgagaccacaggtgcatgccactgtgccaggcctattttttatttattagattcagcaacataaacttactctaattgccataaatgttttcaaaaaccttatttccagtatctcaaaaatcttgtggcagaccagttcatatcacttttgattctatagcacacaacaggttccaaactgccttttgcctgtctgggacattctaccaaggctttgcctgtcattcaccttccagtagaagttagaaagggataagatgtagctcctcaggtcctgtcctggggtaggagaaacaatgtactctgacaccatcagaaacagttagcaggttgaggcctagaacttctcctacagctgatggatttataaccagctaggtctgcaggattcacctttgcaagcaagtgtgggtccctaatcatctgagaaggagatctaaaaaaaaaaaatcccacaacttctggatgtctaccgcagctccacctatgagaattggaagatagagcaaagaggaaagagacggggtataccattatagggaactggcaggctaaattccttgaataatggaggaggcagtaagctcagacaagatgtggaattaatttaaaagcagaacatggattagttcccagaggaggtcccaacacctgacgctaaggaatatatgaaaaaaaattggtgggcagagaaaaggagaggacacaaatggcaattcttccagctgtaagctggagtccaggtcatggacaggcattgaggttgtctagcccatgcaggctactcttagacactctgcagagaagctttagttatagagcactctgctcttcccagaaaggtccgtacccaaggatttcaacacagcaggtacctactgaaaatatttaaaacattctccaaacaaaaggaatctgcattcccctctaggtccatggttcagagcctcgattcaggacagggtggggttggtgggtttgattcctggctctgtgctactatgaccttgagcaagtcgttagcttacccatctacaaaatgggtataacaacacttacttcacggggttgtcgtaaagggtttttgcaaatttgactccataaaagtgcattatcacattgactttatgtgtaacgattgtgtgtgtatgtaaaaacactgaaacttccttgataagagatgtcctttttgtatacatgcatttgtgaaagataaaatttcttaagatcttggctctttggacaactgcatatgcagtagtgacccactgtggcttttgactgatcttgataaaagaatgtgacgagatcagtcatggtatttcagatgtctgtcacagtatttcagatgaccgcagttgtaaacctgggtgtacacaattatcaactatagtgaaatgtgtttatacgtttccctttgtacctatttctttatgaacagtttgcctgttcctgttatatccatgtgactgtcattagtaacctgttcatgcctgtcgttagtatacctgtttatgctaggcaataaaatgtgtatgttattaatgcccgtttcattgtgtaaagtggcctatgaagtgttctgtaatgtttttatgtttatcaaataaatccccttttaagaatgtaaataaatatatttttaaaaattttaaaaattattttttccagaatgatgttttcaagattttaatccttcagaattgtgattttcagggttttagagtttttgggattctcatcttttaggatttcctttttttttaaatttaatttaatttttttttttgagacagagtcttgctctgtcgctcaggctggaatgcaatggtgtgatctcggctcactataaactccgcctcccaggttcaagcgattctcctgcctcagcctcccgagtagttgggattacaggtgcccaccaccatgactggctaatttctgtatttttagtataaatggggtttcgccatgttggtcaggctggtctcgaactcttgacgtcaggtgatccacccgccttggctggccaaagtgatgggatcacaggcgtgagccactgcgcctggctgatcttttaggatttcagcatttgggactatggtgttcatgattgtgtcttttggaattatgatcggctcccattgtaaaagctaaatgaagtaatgaaatacagtgtctggcacacggtaggtgctctaaaaatggcgtgacactttatgtgcgtgggttatctgtgtctgccagtggaatgtaagatctctgaggggagaggttttatgtaacttatgcagtgctgaagctataccacctagaaaaatatctggcactttgttgaatgagtttacagaataataggatcaatgtggcaactttttaagagatgagagagacctgaatatgattaaatagtgataagaaggaaccagtgaagagaatgaagatccaggttcctgcagaggtgggagaggttggagaatcagggctcaggggaaggaactgacctcggaaagaagacagtacacaagtgccaggacttgacgactcattagatatctggttaagaggggaagggaaaagaattactcccagatttcttgtttgggtgagaatggatagtggtgccatttcctgaaataagaacataggctgattagatttgttggaaattcggtgcgttggatacactgagcttgtgatgcttttgagtcatccaagtggagctgtccagcaggaagttgggtatttgggtctagagatcagtagagatgtgggctgcaaaaagattgagagtcatcagcacatatgatgttagctaaagcagtggagtgagaagagaggagagctataaccgaaaccaggcaaacatcaacatttaaggatgggcacaggaaaagaagatctcttgcaatagagactgagaaggaacagagaggtaggagaactgggagggagtttgaacaaataattaaggagaagagagagtttcaaaatggaggaagagatcaatactgccaaatgcttcagagacatcatgaaaagagaaagactatctatctgtcggatttgtcagtgctttttggtggtctggataagagcattctgaggaggagagaagcgagagtggaggccagactacatagagggacatgaggaagcggagaaggtaactgtagcaagtcttgcatattcctggtaggggtatgggggtgcccaatgtgctcccagcctagaaggacaacgattctgcagaagtagagaagtagatggtattccattcttctccataatttatggtatgggacaaaatttggcaaggacgcctctcaatcttactacccctccctggtgttgtagtgataacaatcccaggatctttttctggaagggcagagagagaggggctttgtaatgtggggataccagatactcagctatcctggccaggagcccacaagcttttaaagtccccagggcagtgcaataggtctcctgtaccttctcatgcaagcgtcccaaatcaggcagctgggactgtgtgttaactctctagacttcctgcctcagagagctctgcaaagtttcaagggccatctttgcactctggaaactcagccagcttggaccatagcaatgattccttagcagtatgtgaatcacagacgcacagtcacagatacacaccacacaccccagctttcctaaaacaaaatgcatctcaagagaggtgtggttttcctctgtagagctgggtaagagaaccatttctacatcagcacctcattagctaccaccaggcatctggtagacctcggtaccttggccactagccagcctgcccatgaaacagcagctgtgagaggaagtagaaggcggttgttaaatatgtggacttgggttcaaaacctagttttatcacttcctatctgtgtgacctcgggcaaactgcttgacttctctatgcctttatttcctcatatttagaactggactaacaagggttagtctcattatatgattgttgggagaattaaaacagaaaaaatatgaaaaaatctcagcaygggacctgatccaaagtaaacatcagtaggtgtgagctatcactgtcactgctgctagtatcactctgcagcatggacgtggcttggattagggctctgctttctgctgaaactgtttggccacaggtttagcctgtaggtgcctcactttctcccaataccgagtggccctactggccaccaactaaaagagacaacactcaatcatgtctttcaccaaagcacaaaaagccattcaaatgtatgaggcaaaatattggcaggaaaatggggtatgccaattatgtgtcaatttaggttttacgagttatattttttctttttaaagaaaacattcaaaatgtttactgtgacttactctaggatctttatttttcttcctgaaaaaaacttatctaattataatgaaagtcactgagaaaacagaattcacttaattaagtgtctaacattaaatgttgttgaaatgatctaacatttatggccccaggacacatcctttcatttcattctcttgactaataagtgaaataaggctcagacttttccaagatcacatagcctgtgaagtgagaaagctgtgagaactttcagtctccaaatcttcatctcctttcaatctatcatatattggaatatgtcacaataattagttttcttcagaaactctttccactaaaagagtgtcttatcaacatttcccacatccttacactctcagtctctggagggcagaaattaatttccactcacaaaaccaataccaagtgtctactgtgtgctaaaggctctgctaggtgttggcagccatgaatagaccatgcctctatgtgagaagttcacagtctctatgggagaagaaataccagccaatagttatatacacaataacaaagctatgtgtgaggcactgtggtggtgcacagggtaggggaaagagtaatggagtgtatttctaggtaagggaagactttgcattccatgagaccaaacagattcaaaagacctaactcaaaatttagagcaaaacaagtgctcagtaaatctgagttcctttggacctactgccatcccctccccatctctctaattagaggaagatgtatccaagtgagcaatactcgagggaggaaaggaggacttcccagcagagagtacaaaagtgtgagagcaaacaggctggcttcccagagaagcaggactctggtctggacgggtgggcacatcagcaccccttcctttacactgcctgctccttagtctgcacctagggatgggagtcaatgactaggtgggctcagggaagagtgaagcataggaaaagagaatgtatgcttcacacagcatttggggattttttttaaaaaggtaagatttaggccaagcctaagcctggtgcaaggggtgcacctagcagagcactagcagtcccgcaccaagtttgggatttggggttggtgcagccagtcacgttgctggtgcgtggcagtgtacagggcattgggtcagcgggtctgggactctggtggcactggtggcggcgtgggactgaggctaggcacatgtgcggggctgtgttccggcagcttcggacccatgcaatagcaatgccagtcaacagggcccacaaggatgctgacctgyggtcctcacatgacaagatgctggcgcagcccctcaaagacagcgatgttgaggtttacaacatcattaaggagagtaccrgcagagggctggattggagctgattacctcggagaatttcgccagctgggcagttttggaggccctaggctcttgcttaaataacaaatactctgaggggtacccgggccagagatactaaggcaggactgactttactcatgagctggagaccctctgtcagaagcgagccctgcaggcctataagctggacccacagtgctggggggtcaacgtccagccttgctcaggctcccctgcaaactttgagtgtaactgccctggtggaaacccatgggtgcatcatgggcctggacctgccagatgggggtcacctgacccacgggttcatgacagacaagaagaaaatctctgccacgtccatcttctttgaatctatgccctataaggtgaacccagacactggctacatcaactatgaccagctggaggagaacacccgcctcttccacccgaagctgatcagtgcaggaaccagctgctcctcctaaaacctggactatgccccgctgcagaaaaactgcagatgagaatggggtgtatctcatggtggacatggcacatatcagcaggctggtggcagctggcgtggtgccctccccatttgaacactgccaccamcactcacaagaacctgagaggctgccaagtccgcacgatcttctacaggaaaggagggcaaagtatggatcccaagactggcaaagagattctgtacaacctggagtctctcatcaactctgctgtgttccctggccttcagggaggtccccacaaccacaccattgctggggttgctgtggccctgaagcaagctatgactctggaatttgaagtttatcagcaccatgtggtggccaactgcagagctctgtctgaggcactgacggagctsggctaccaaacagtcacaggttgttctgataaacatttgatcctcgtggatctccattcaatcaaaggcacagatggcagaagggctgagaaggtcctagaagcctgttctattgcctgcaacaagaacacctgcccagatgatagaaacactctacggcccagtggactgcggctggggaacccagcactgacatctcttggacttttggaaaaaggcttccaaaaggtagcccactttatccacagagggatagagctaaccctgcagatccagagcaacgctggcatcagagccaccctgaaagagttcaaggagagactagcagggcataaataccaggggtgtgtgcaggctctccaggaggaggttgagagcttcactctcttccctctgcctggcctgcctgacttctaaaggagccggcccaccctggatgcacctggtgccacagaggaagctacctgctggaggatccccttgagagatgtacaagctgccccacaagggacccactgacacttgtttcctttgaggggttttcttttggacttttttcatgttttcttcacaaatcaaaatttgtttaagtttcattgttattaattctgggacaggttattacaggtttttaatttgaacctggctttctcacagctggatataattattctagaaaaataaaaatactgtgtagccacttggccataatcatttagaccatggggtagggcagagctattagaaagattctagtgttttactctccctaggctttcctttgccttgctgcagcagagaggaaatgctcctgtccacagcttgtacacactgccactcttactatcttgttacccagcagcatgccaaaggggagctgaattcgcctctgaagcttctgctgtgtgctgtaaatcagaagtgtacattagccaagtgtacacaaggtgcactcagtatggtgggagggttttgctgtcagtagttcaaagtatggtgtagaaagggtctcctccctccatcctgggaaatcccagtcccatactggtgtgagaatcaaccaggctttcctgctccacctgagataaccaactccctcccataatcaggaaaccaaatgtcaccttcccaaagaaactttattttcacatagctgaagtgcaaaacatatacgaccatttttaataagcacaatcaaatttttaaccactgaatgtctataagaattatagctttaaaaatacaatttttatatttcaaaaatatttgaactsaaactaatttcttaaaaagttaaaaaaggtaagatttaatagtttttgtagatcatctcaaaattaacacatcaaaaagagctttatcaagtccttttctgtcaaaatattgatgctgcagaaatcaaaaccttgaatttacttaagtattttgtgatcaaaataccaagaaatactagctacccatatgaaaaaaaaaaaagaaccctagatctcaacctcattcctaacacacaaaaccaaaaatagatgaattaataatttaaatataaataacaaaactgtaaaacagaagaaaacaaaggatggcaccatcatcaactactatgtgggtacataaatcccaaaactgctatgaagggcaatttgccaataactctcaaaatgttcaagaaggcagaagaaaacacaaacataataagaaatgaaacagaagatataagaagacctaaatggaacctacagagattaaaaacacagtatttgacataataatatacatggtgggattaacaagtgattaaatgctacaaaagaaaaagctataaatgtgaagacacagcaatataaactatccaaaatgaagcagagagagaaagaagattgaaaaacaaaaacccagagcatcagtgacctgtgggacaaataatatagcatccatgtaatttgaatcctgggaaaggagatgaggcagaaaaaatatttgagaaaatatgtaaacaaggtccaaatgtgattacaaagaataaaacaaaacaaacaaacaagaaaactatgaacctacagatctgaggagttaaataaactccaagccaaataaatataaagaaaaccacagccaggcacagtggctcacacctgtaatcctagcactttgggaggccgaggcatgtggatcacctgaggtcaggagtttgagaccagcctggctaacatggtgaaaccccgtctctactaaaaatacaaaattagccaggtgtggtggcgcatgcttgtaatcccagctactcgggaggctgaggtaggagaattgcttgaacccaggaggcggaggttgcagtgaaccaagatcgcgccattgcactccagcctgggcaacaagagcaaaactccatccctacgccaaaaaaaaaaaaaaaaaaaaaaagaaaaccacaacaagggacaccataataaaattgctggaaaccactggtaaagagaaaaatctcaacaggcagccagaagaaaatgaaatactacatacaaaggaatataggtaagaatgacagaagacgttttgtcaggaatgaagcaagtaaatagagttacatatttaaggtagtgggggaggggtggtggaagtgagaacagggtactgtcaacctagaagtgtatacctagccaaaacatttttaaaaatctttcaaaattgaaggtaaaataaagacttgttcagacaatccaacactgaaagacttcgcagtcatcggacctgccccacaagaaatgttaaatgaagttcttcaggcagaagaaagaggataccatatggaaatacgtatttacacaaaggaagaaagaccaacagtaaagaaaactttgtgagtaaatataaaagaattttccctctcattaaaaaaacttttaaaatgtttgaattgtagtaaaatacactaacataaaatgtaccatcctaaccatttttaagtgtacaattcagtagtattagttattttcacactgttgtgtaaccaatatccagagctgtttttcatcttgcaaaactgaaactctatatgcattaaacaataactctccattcctccctcctcccagcacatggaaaccatattctactttctgtctctatgaatttgatttctctaggcacctcatatgaatggaatcacacaatatttgtttttgtgtaactggctcatttcatttagcataatgtcctcgaggttcattcatgttgtaatatgtgtcagaatttccttccattttcaggctgagtaacattccactgcttatgcataccacattttgtttatcctttcatctgtcaatgaacacaggttgcttctactttttggcaataatgaataattcctgctacaaacaccctttggagccctgctttcagttattttgggtatatacccagaagtggaattgctggatcatacggcaatcctattttcaatgtttttaggaactgcatcctgttttccaaagttgttgtacattttacattcccacagagtgcacaaggattctaatttctctacatgcttgccagcacttgttattttctggttttgggataatagccatagtatcctaatggatgtgaggtggtatcttactgtggttttgacttgcatttccctagtgattagtaacattgagcacatttttatgtgctttttggccatttgtatatcttctttggagaagtgtctattcaagttctctacccgcttttaaatcagtttttttcttgttgttgagtattagaagttctctatattttctggacaacattaacctcttatcagatatatgatttgcaaatattttctcccattctgtaggttgccttccactctcatttttaaattattttaaataattgactatttcaaacaaaaataaataagctgagcacggtggctcatgcctgtaatcccagcactttgggaggctgaggcaggcagattgcttgagcacaggaatttgagaccagcctaggcaacatggcaaagtcttgtctctacaaaaaatacaaaaattagctgggtacggtgacatgtgtttgtggtcccagctacttgagaggctgaggtgggaggactgcctgacacaaacaggttaaaaagataggctgctccccaaccacccgtgggacagctcaagggcaaatataaacatgctccttcccacaaacaaaagtaattgcaaaaaccccaattacttttgcaccaaccaaataaaaggatggaaaacatacaccatgatacagcttatttttataaaggccagagtggtttattaatatcagacaaggaagattttggaacaataattatttgactatcaataagaaaaagggacatttcaaaataatgaaggaatctattagaaatgggatacaacaatcctaagtgtatacacaccaaatgacagagcttcaaaacaaatgaaataaaaactgataaattaagacttcattacccctctgtcagtaattgttagaaaaagtgtacagaaagtcagtaaggatacaggaaactagacacataccataaaccaacctaagctaattgccatttatagaataccctaaaacagaagtattttcttttcaagcacacacagaatattcaccaaaatcgaccatattttgtcccataactcagatttcaattaatttaaaagtattaaaatcatataacgtatatttggagcacagcaaaaataaatcagaaatctataacacaaagatatctggaacacccacaaatattaggaaattaagcaaaaacacttccaaagaactaataggccgaagtagaaatcacgagtaaagttagataatatttttaactcaacaaagataaaaatacaacatatcaaaatttgtaagatgtagtcaatgcaatatatagagtgaaatttataccattacaatgtttatatgagaaataaataaaatcaatgatctaaccttctagcctaaggaaaaaaaaacaaataataaattaaagtccaactaagagaaaagtgaaaaaataaaaaatgaagataggcacagaaatcaatgatatagtggaaaaaatatcaatagacaagaaccaatggaactaaaagctagttatttgagaggatcaacaaaaaatgataaacctcaaatcagatgaatttaagaaaaagagagaaaaaatgcaaattacgaatatcaggcatgaaagagaggactctgtctctatcctagacattaaaataataataagggaatattatacacaattttatgctaataaattcaacaacttagaagaaaggcaaaacttccttgaaagacatgctactaaagaagaaacagaaaaacttgaataactctagaattaaagaaatttaatttgtaataataataataaaaaaaaacttccctggctaggcacagtggctcacatctgtaattccagcactttgggaagctgaggccagtagatcactggaggccaggagtttgagaccagcctggcaaacatggcgaaacaccatctctactaaaaatacaaaaatttgttgggcatggtggtgcacacctgtaatccagctactcgggaggctgaggcacaagaattgcttgaacccaggaagcggaggttgcagtgagctgagattgcaccactgtactccagcctaagtgacagaaactatgtctcaaaaagaaaccaaaaacaacaacaaaagccttcctacaaagatgtgcaggctatgaaataataaaaaatacaaatattggtctctgctcctggtccctacataaagctcctaaaaatccttacagataggggcactaagagaatcttttgttctaatatctagtctttttttttttttttagacggagtcttgctatgtcgcccaggctggagtgcagtggcacgatcttggctcactgcaagctctgcctcccgggttcacgccattctcctgcctcagcctccagagtagctgggactacaggcgcccgccaccgtagtgcccgccaccacgcccggctaatttttttttatttttggtagagacggggtttcaccgtgttagccagaatggtcttgatctcctgacctcatgatccaccctcctcggcctcccaaagtgctgcgattacaggcgtaagccaccgtgcccggccaccaatagttagtctagtctctgaccctagtttctgacccagagctcttaagacctttgtaatttcctgactgataagagcacatctgacagagagctgctaaattccttcaaatttcctgggtgataggaatatcttttgttctcatgagatgacttctggatagccttatgttgggtgctggttggcaggggaaccaactatgcaattagagggctggaactttcag

SEQ ID NO: 95266 - DNA, 107028 bp, Homo sapiens
  misc_feature (1)...(107028): n = A,T,C or G
agaagtataaaggaatgctctggcagacagcaacagggccctgtacttattcagactaagggtcagggaaggctgccccaaggcagtgatgcttgaaccaaaagtgaagaatgagttaccatgtgaaggaggtggggtggaaagtcttctagaaagaatggggagagggaagggggaaatgcagtatgtttgaggaattgaaaggaagctggcgccaccgcagaggactgaaccagaagcgttgtgttggatgaggtggggaggtaggcaaagggagggcatttcatccatgtggaggagctggctcctaatccagccccatgtaagccattcgaaggttttcgtggcggagtgacataaccccatttgcggctgcagcgcagagataagatgggggaggggcagagcagatgtagagagatcagtgaggaggcgctgcagaggtccagataagagttaatggtggcttggaccagtgaggcatcagcagagttgaagagaaaggtacagattagagaggtgctctggaggtaaaatgaacaggattctggcttgcctatagatggacagtggggccactgactcagacagagaactcgagaaaggaatcagggagtgaagatctggtgggagatcttgggcatgctggggctgaggtgcccttgggacacaggtggagatgttgactaggcagctggctgggctcctccccatcaagggcttacacaagaggttccctgggtaagagtcataaaggtgtgaatcatcggcagatggacagtactcaatgctgtaggcatggatgagatcaccagggacagagtccacagtaagaaggggaaaggccaaggcatgggcgtcgagggacaggagcacttgatggattgagtggaggaggatgaccccgccaaggagactgagaagaagaccaaggagttaagaggcaaaccaggagagtatggtgtcaagggagccaaagaagttagggtttgaagaatgcagtaatcaagaggtctaagaaaatgaataccgaaaaaaaaactggccttcaaattttaagacatggagatcatagcacagacattgtgttttggggagatgttgggggcagagatagtaaaagccagatttgaccaaatgttggatgaagtgagtaggaatgccataatggcaaacagaacactcttatggaagaagaggctggggccgggcatggtggctcacgcctataatcccagcaactttgggaggccaaggcggacagatcacttgaggccaggagttcaaggccagcctggccaacatggcgaatcccctaagtctactaaagaaaaaaaaaaaaggaaaaaaaaattagccaggcatggtgccatgcacctgtggtcccagctactcgggaggctgaggcacaagaatcacctgaactcaggaggtggaggttgcagtgagccgagatcgcatcaccctgggtgccaaagcgagactctgtcaaaaaaaaaaaaaaaaaaaaaaaaggaagaaagaaagaaagaagagaggccgggaactcaggaatggaaaaccaaataccgtacatcctcacttagaagcaggagctaagctgtgagtacgcaaaggcatacaggttggtataatggactttagaggctcagaagtgggaggatggcggtggtaagggatacatattgggtacaatgttcgatattcagatgacggatgcaccaaaatctcagaattcaccactctataattcgtccattaaaaatcacttgtactccaaaagctattgaaattttttaaatgtgaaagaaagaaaaggccaggtgctgtggttcacatgtgtaatcccagcactttgggaggccaaggtggaagcatcattagaagccaggagctcgagaccagcctgggcaatatagtgagaccccacctctacaaaaaataaaataaataaataaagttgatggagaaatggaggagaaagtaagcatgcagggagtaggtttatggatggctccagttgaaggttgggggtggtgctcagggaaggaggggacaatggataggtgaggggcctgagaagcaggagtgggtagggaatctaggattggcagagacactggcctgagagaggaggagggtgcttcctgtaaggcagcaggagagagggcagatgtggggaggtgtgtgaatgtgctagtggagagccaggaaaattctgtggtggctttaatcctctctataaagatgtggcaaggtcccatctgacagcgaggggaaaatgggctggctgaaggtgtaaagagaatggggagggctggaatagccgttacagagagtgcggttccaagccgactggagaactgcgcagagggcccctatgtagtccctgctttaagggaacatctgtctgacctgtggagtcatgtggttgcttgagcaccgccctgtgacggcagacaggagggctcacttggagctggctttttgccagacagatatgataaaaaggcagagaggccaagaggcttgggttattgacaagagtgttattaaaatgctggaccttggcatctaagttggaccaggagaaaagtgaaaaggagagagctgaggagagctctctaggagaacacgaggtcaacagcagagagatctgatgagacggagcagtgatcgcgaggtagagggagcaaggtgggagcaggagaggagcagttttgggagaggacaggacccagcgtgggatgcttagaaagagtaggctgggcagccttcaagggtcggccattgtgatgagaggtccaggagctgtctgtctgcaccggcactgaagtaacccaggctgatggcaggaagtagcaaaggccactgaggagtacactaagctggaaacagaggcccagccattagctttggcaaaatggaggggaagagtcattatatcaagagcaacatcaggccaggcgtggtggctcacgcctgtaatcccagcatgttgggaggccgaggcaggcagattacttgaggtcaggagttcaagaccaactcctggccaatatggtgaaaccccgtctctactaaaaagacaaaaattagctgggcgtggtggcgggcacctgtaatcccagctacttggaagggtgaagcagaagaatcgcttgaacccaggaggtggaggttgcagtgagccgagatggcgccactgccctccagcctagacgacagagcaagactcagtctcaaaaaaaaaaaaaaaaaaaaaaaaagagcaacatcagtgaaagccagaaagcagggttgtggtgggttggggagcgagcaggagatggaggaatagaggcgtcctgtagaaatggcttttgggtttgtggggaaggagaacagagaggcacttgagtctctcccactctggagaggcgtgtggggccaagggagggaattttttttaggatgggaaagacatgcgcatgggcagatgggaatgctatagtgaagagggtgcagtggacggggaatagagagcaaagcctggaggcgccggagcaccctgagcacaggggagacagagcggaaggaggagaggtgtgtgggtttgcggatttggtagtgggagatgagggagtcctcctgtggtggcttctgttttctccgggaaacataagcagtgttcattgagaaattaactcctgtatcatttctccctgcccatagtgactcagccggaagaaatgaaaggcattagccagggccaggcactgcagctcatggctgctgtaatcccagcgctttgggaggctgaggctggaggatctcctgagcccaggagttcgagatcagcctgggcaacatgatgagattttgtccctacaaaaaaaattttttttttttaattaaaaaagcattagtcaagcttttgtgttctaagtcctgggccttttttctcccacctcatacctgagaaagtaaataggccgttttgtagttcttgtgtctgagctaagagggagaataccactgtgtcttggggaattgatgctttggcatggaagagaggggcaggggaacaggcattctccatcccaccctgacctgcccccagaagaaagtggctgcatgcgattcgaaagccaaggactaagggctgcaactgcgggggcctgtgggagaggtcctcttgaaagagctgggatggagggagtagagggttatcttcccaaggaccaggttggacaagtgaggccctgcagatgggcaaaaaatagtggaagccctgtgactgtgaccactgatgtctgcaacagcagcagcagcagcctgaaaaatccttccacctttctctgcaaggctgtggagcacggactgaccatctctgggattgtgcaaacccctggagttcatggatgatcggagggagctgaagggcagccatgagtgatagggaaatcttgctgatctgatgggtagagactcaagctgaatttaatttggtttagaccaactaagggatgaccaaaaggtgtatttacgtcatgagttgcagagagtgtccagttggcccaggacctggacaaagggtgagcagtgagtgggagctgacatctggctctctcctcaccctgcaccctggggctggaacacagcagacacacaatgaccacrtggtgccactcggccttcacagatgagcacaaggacatccctccccgccaggcccaggagcagggcagcagggcagccccacgtggaccccgtgctcacagtttggcaaactggacagagccttggctcttctccttcagcagctatcacgctctcccaggcccggccacctgagcttctcatccatgtggctttggcacctaggcctctagtttcattaccttgggtttgtatctagttccagatggcgtacatgcagagatctgggcaggctgcttacaggcattctcttgccctgcctcgacaaacactttgccacatgtgggtgaatgagagggcagacgccaatgggttaggattctgagacccctgtgtccctgtggggtttggagcaagagactggttggcacagcagtgagcacatctgctaacttcaaccacaggaagccaggggtcccagctcacctaccttccagtactgtgctcagtagccttgacaatgcggggcagagggaacagggctgccagagcttcaggactaccaaggcccaggctagcaggcacacaggctagcgaacaccacgagcccctcttctagtgcatgccagggctacagaagactggggctggatgagctctaagacttggtcagggagctgttccctcacttagtcatttatgtctgatggttccttgagcacagataggaaagtcaatcttcattctttaacaaatatgtatcaagtatctattgtgtgtgaggaccctgtgctggccactgggatatgacagggaacaaggtggactcatttctcctgcctgcaaggaactgctgtccacaggtcagggagataggcacagatacaaacagtggtgacagccaggatggcttcctggaggaaacaatggttccaaacaggtacagttggctctgaggtgccaaaacacactaaaggtagagcaagtcttttattttattttattttttaaaacagagtcttgctctgtggcccaggctggagtgcagtggagcaatctccactgcaacctctgccttccaggttcaagcaattctcctgccccagcctcccaagtagctggaattacaggtgcacacctggctaatttttgtattttttttttcttttagtagagatggggtttcaccatgttggccaggctggtctcgaactcctgacctcgggtgatctgcccgcctcagccccccaaagtgctgggattgtaggcgtaagccaccatgcctggccagtagagcaagtcttaaggggcattatattataactgcatgcaagagaagttaggaccagtttggctttgtgcgtgtgtggactgaaacccaaaagccagaaactctctgcatgtgtccctcatggagccatatggtctctagtctctgtttttcaaaatttgcaggactgatgactgattggacagtggtgcaggagggaaggtctctgcatgtcagtgattaaattgctgaagatgccactgcctgagacgggcagtattgaaggtaagcagatctggggtgggcgggacagaggaggctcttagttatatggatctggagctcacaggagcggcccagactggagatagagacttggaagtcatcagcatatggttggtagtggtcaagatgatccagagaaaaggggcagagcaggagaaaagaggaggcctaggacagagtcccggaagagcagaagacgaggtggtaaaggaatcagagacagtagccagtgaggagagggtgggccaatgaagccaaggaaaagaactgttttaataactcagcaatgggcaggaataattggctgaaaagtatacttttaaaatttgggggccgagagggaatctctaaatcctcaaagttctggaaaaaaaggcaaaaatgcttaaagatgcataaaatttgcaatacctcccccgtggtgcaccaaaattaccaatggtgaaaaaccactcactggaaatattcatttttgatccgtttgtcatccaaaccaaattgtccagaatcactggagccagtcccatcccctcctcatacgccagggggcgcacacgcactgtttgtgaattcaagttcaggacaaaaacaggcagtgaatcaggtggttaccagaacctgattcctcagcccagatccctgaacaccacagcaaccatgccctgcacattaccacgtgatccctgaatccaggcacctcaacgatctccaaattttatttctcacctgactccaaacttacagggttatcagaaagaccccacagaagaaaccccacagaggagaaacctcatctctttttctgctcagttacctgacccagggcagtgggggtaggtcccccatccttcatggtgaagcctagcaagcggcggggggaggaggggtggggtagataggaaagagctggtgtggctttggctgactcttaagtggttttaacacggattgcgtgggggcggggtctggaggcaggggcgcttggattgaagctcatcaaatccctctgatcagtaggtcttggaataaatcttcaggtaggttattggtttcacccagaaatttctagggtcattatttgagtttggtatgagaagtcagaaactcagtactgacatttaaattacatttagagggcattatcatgtctttaattccgaggccaatgtaaggttcacagctggaattggtataatattggggtattagtcagtctctgcttggggttgacactaggtcagagaagtggagggtgaacatgaggatgaaggggctttgtgtggagtttctgcaaagccagtcttatcttgggttccaagattattattaaagctgggttggtttagggtcctaaatggtctcaagtttgggtggggtttcaggtcagtatctgtgtttgggggtccttttatggtgacccaatcccaactctggaattgagaatcgaattcagagtgcattggtgttgatctgggaatgggagagcagtactggagttttatgtaaggcttggggttcagaagagagataactggggtccatagcaaggtagcttttggactttagggttcatttagggactgggggctgagcattagtacagggttccatttaaggtccagcgttggtgctagcgtcactatcaaggttagggcaagtagaagtaataaagagatttagagtcagaattggtatttgggatcagtatagaggttcacaacaaaattactacttgtgctaatttgggggcagattaagggctttggactcaatattgggtttagggcaaggtgtgggctcagtatcaggttcagatctgtatggggaggaaatggggtcctagagtggtattaggttcatgctagggctgggagccactagaaggatctggatgtagtatcagagtttggtctgtctatgttcattattggggttcgggttcaatattgaggttccggtcggtttcgacttggcgttgggttgtggcctgtcwgggcctcagcggctccgcggctctacgagcgagagtgcacgaggggaggggcgccgccgggggcgcgcacggcaggggcaggggcgcgggcgcgagcgcgaggggagcgcgcggctggagctggcgcgggagcggcgggagcggtggcggcggcagaggcggcggctccagcttcggctccggctcgggctcgggctccggctccggctccggctccggctccagctcgggtggcggtggcgggagcgggaccaggtggaggcggcggcggcagaggagtgggagcagcggccctagcggcttgcggggggacatgcggaccgacggcccctggataggcggtgagtgaccccccggccccccaccagccccctccgctcccgtcccttccccgctctccttgccctccccgctagtccacccggcggagctgggggcggtcccgggggggacgagggcgccgctgaggccgggccgcgcccccacctgccgcgcccgcagcctcggcgaagnnnnnnnnnnnnnnnnnnnnnnnnnnnnnnnnnnnnnnnnnnnnnnnnnnnnnnnnnnnnnnnnnnnnnnnnnnnnnnnnnnnnnnnnnnnnnnnnnnnnnnnnnnnnnnnnnnnnnnnnnnnnnnnnnnnnnnnnnnnnnnnnnnnnnnnnnnnnnnnnnnnnnnnnnnnnnnnnnnnnnnnnnnnnnnnnnnnnnnnnnnnnnnnnnnnnnnnnnnnnnnnnnnnnnnnnnnnnnnnnnnnnnnnnnccctcccagccggcgggggatccgcagccggcgcgcccgggtctcgctcgcggccccggcgcacgtgcggtcccgggctgcgccgggcgcgagtttgaagcccccccacccccttcgttcgcgagcacgggatggggaggggccgaacgggctgtacccgcccccaaccgggtgcaacgccctggaggccctggagcgacctgtcccgtgaggacgtggccactcggaccctctccgaaagttcactcagtggccgccccgcgtcccgtcccgtcccgtcccggctccccatcgccgtgccggcgtctctgtctcggctgctttctgttttcctcggcgtctctgcctccccgtgtcagtgcctcccaatctcacgcccctgcaatcccagggtctctccagctgtctccattctttttccccaggtcactctgttctttctccccaggtctctcgattctgtctccctgggtcgtcttgttccctgtccctgagtctgttctctccgcttgggtctctctatttcctctccctgggtctctgtctccctccttaagtctctgcctcttgtctctcacccatctcttggtgtctctgcactctctgtgctaggcgcccccccatttccctggaatgctgcccctctggttcttccaccccggagggggaggggctagactttctccccatttcaagcccccctgccccccagtgcacggcccctgagttggagcaggttgggggtggggagcgctacctgcctgagctgtgaaatgggagagggaggctgccccagcctgggggttgtctggatctccctgaggggccacagggcagggccgggaggctggattaggttgaggaaggctccacttttgaaggaacaggggcagggatccagagcgatctggtgtcggatctggcctgagaagcagggaagtgcactggggtgagaggcgtagaaaaggatgtggggtggtggttccaggcgggtgctcatggggaggaatctgctgagaagggaagatctggtggggaatcctttgggaggcttcggggatctgagggatccagaagagagttctgacaggctatctaaggaaatttctgtgcttagctccttattaactcttgcttcagggagcatgaaaatccctgttttttactgattatatgaatgagcctagggcttcaagaaggagcaggtgtaactccccaagtacaaccccctacattctcagccccaggcacaggccacactttctcgtaccctcttgccttcatttccacactcagctcaccccctccacccccacacacactccctattcagctgctttcttgccccctctcgcatacctgggcccgcatgccggccagggctcaagaaatctgtgcctgcacactctcgcagcatacctgtgcacatgcacagtcatccttgtgtatttttgtatatgcactttcttgcacattttacttgctcagtctcttatttgaaatgtctttatagtgttttttttagtttcctttatagtttccttttccagctgctcttcctcttccctctttctttcctttaacaagaaaattgttttaacataattccttccttccttcctccctttcttccttcttcttgcaactactgatacctcccctttatccagctttgtgtgccctgggcgggttggcttggtgtacaaggctgccaagagaggagggggtggttgggtgttggtgaaggaatttggcggggcagagttagactgcagcaaacggaaactagctacacatcttttrctgggaagtgtatggatacgcagcaaaatactagccctggcagtttgggcacagtccacccttttttccatcagccygaactatgggagtctagctttgagggtcctccctgggggcggggaggaggggacccagacctcctgcagtagaggggttgtgatacacaccacggctcctccactttccagcttcaggcctcaaagaggcccctttctccctgagtctcaatttcactccctgtaaaatggggtagctaatccaacccggactgggtcccagggctkttgtaagaatccaagggaactgtgtggcagtgcatcgtcagcagtggcagtcacttcccttgtgactgacactgctgtgtgcytggttccagcttgcagtcagggccctaccctcgagaagctcgtggtccttgggggagcaggttgcaccatgggattgcaaaagcaattcagttacctgtcattgattgctgactgtgtgccagaccccggggtaggcgctttcggccccggctgcctttcttcctttgggactaacagctatgtagaagaggcagcccacccctaaggttcaggcatctgctcaactaaagcagctgcggttctgagttgggttagaacattgcaagagttcatcaagagacgggggagagttcggaggtcagggtgaggtgagtcccagaggagaccaagaagaagtgatgtgaactaggtttggagggatgagtaggagtttgaagaagagagaaaggacttgagatagataaaaaccagtatgaataaagactgggaggtgttgtcacttgtgaagtattcagagatgtggcagatcacagagggcattgaatgccctgttaagtacctgtaattttactctgagaacccagagagaaaacaccaaaggtttaaagcttggatagggagggtggagtgtgctgtggtcaggtttatgtttccagaaaatgctctgtggctatgggaaaaggatggagacaggatgcccagtggggcaagagggtgcaggtaagtaaggtgagagaagatgctggctttgataggtggtagcatggtgccatcttgaaggtacacttgtcaggacagaatgatttattggatgtgggagtgaaggagaggaagaggaaggagtccaggttcctcggagtggttgagcgggccttcactgaaggccctgaagcttcactgtgttagggacttggtgaggaggggcagagaataagctcttagttggacatgtggcccttgaggtacttgggacattggaggctcagtgggggaggcacatcaaggaggggctttggtgtgagggtatgggagagaaatgtcggtcggaccaagagaagcgagagctgtatgagagaccatagagctgtgcacctcgagagaaagtaacctccgacagtggtgaagagctcgagttttatactgctaggattggactctgtttactagcagcgtgactttaagcaagtggcttaacctctctgaatccgcttcctcatttgtcaaatgattataataaaaacccgtgccttataagggttgttatgaggattaaagatagtatgcataaagtgtgtgtagcacagggcttggcatctagtgagtactgttgtctgtgtttgcagttactgtaatcatcctcaactgggatggtgtaaacccaccctcccatcaggggtcacatgaggttgcctttaatgagaagatagactgctaaggttagggtccctgtctgcctaaggttgctgcaattctgagctgagattagcaggtcaaggagctcaacaaagggggtgcctgcccctattgttatcgatgggattgtttgtgttgctcaggtgtttgaccttcaggtgggtgggcttgagaagactagaggtgaggcctgcagaagagactccatgtttggggtaggtggaagggaattttgagaaggggcagccttggggtattgagttctccatttcctcccaccctccctgggccctgggcttctactgaggctctttctgccaccatctgcctctgtggtccagatgcaccatgtctctgtgtgaccgtgacttctaggtctgagaactctggttttagctccttagcagtattttagctgctgtttctggggactgttcctggtgcagccacaggggcattctgggggttgctccagagggcagctgtgcctgcattcccctaggtatcatcgacttgctcctgacccactgccgggccaggtttcaggcctggcagatgatggggaaccctactggggccagccctgcgttggccccaagggctttctttcttgatattggacatgactgtggacttcaccccttctgaggccttcctgggtgccaagcagtgtgatttctttctttttctctttggtttgaaacagaatctcactctgttgcccaggctggagtgtagtggtgcagtcgtggctcactgcagcctccacctcctgggctcaagtgatcctcccacctcagcctcctgagtaactgagactacaggtgtagtcccacctggctaatttttgtatttttttagagacagggttttgtcatgttgtccaggctgctcttgaactcctggctcaagtgatccacctgccttggcctcccaaagtgccgggattacaggggtgagccactgtgactggccagcagtgtgatttctaacttgggtcctgaaccattcaggccctttctgagtagctttctagtcaaccttccagatgtcagctctggctctgttctgggggtgtatctggttgtcctggttgttctgggctctgtcccagtgtgagtgtagagtgggttctgggagctgcagttggtgaatctgagtctttatttggttgcctgataggttgttttgaggtcagtttgatcccagactgacgtggttcaaagttactgtttggcttttctaggatcctgccctcatgctgttctgtgtgcctcagggtctttgcaaatgtttagtcttctaaaatggcccctggccactttgggtacacacctctttccaggtgtggcttctgctccatgtagggcctgtctcagtctccaagcacgagaccctgctgtggctgggtgtggcagcagcgcctggccagcttggggggcctttcccattacccagttccctgccttggactctgcccctctgcccagggtctctgcacaatggtgcagccaaaaacctcacttgaatactgtgaggccctgcgggcatctctagacaaatgggcctttaagtttggggcctggaagctggtttgtctggccagacctgctgggcagcctgtatgctgggagcagcagctgctggaaactcagcttggggagcggggagggaagcatgcagagagggctgcgggttctggtgcaggtaggtggggcagtggaggctgggtcgccaagctggcgagggccatcttgggtcagttgggatggccttcagtcggtgagagtacccccatattggcagaggtggttagtgcaacttgagggtaattcccaggtgcagaggtgtgtccttgatttcatgatgagggtcagtcttgggccggtgaggacattcccacgcaccaccctcccactgtggtttctttgtgtccgttataggaggagccaaggtggcagagtggtgtggggtggggatcactgtgcatgtgggggcttgaggtgagaagcctgctgcaaggtgcagcttgcgtcgagtaggccaaacagctgagcttccgtgaagtggtgatgaggtggtatgggtgtgtctgacccccacccccacccaggatggtacccacgctggtggggactcaataatggctctagaaggaaggggctgggctctgtcgctgcatgtgtgccagcrgaggaggcatccaggggcacgccttcattttaaaaattatagagtagagaaagtcaaaaataaatattgcttctgaagcttctttgaagactggcatgtatgttggggtgtgttcttccaggctgggctgttttctttgaactcattcatgcgttcatccactcattcagtgtatgctgactgagcacctactatgtgccagctgtcagccaggcgctggggatacggaaatgagctgggcagccacagtccatgctcctatcaagcttatggtagtgactcagtaattgtaaaaatatataaatagtcatgtttgtggtcacggctccaagccaaggtccaggcaggtagtctgggacattgtggaaggcttccctgagaaagtgccactggacttgagatccgagggtaagttggccagaagagcatgggtagcctgtgccaggcagtggcattcagcactggcaaggctgggagacaggaagaaatttggcacatttgaggatcagaagaggaagttcccgttctggcaggaggagagcatgggcaggtagggctgcagaggtgggaggggccgactctgcttggctctggggtcatgctgaggagctgggccacagagtctactgctgaggtcagggacttggtctgtgtggctcacagctatatggctggtgcctggaaggacgcccagcacatagtaggtgcttagggagtatcaaaatgaatgagcgagggagtgaagggaaaagatgggcatttttaccagatggggatggttctacatgaacatttccataacctgcttttttttctgcataaacagcaaatttttaatgtctttctgtgtcaatacatatgctgttgtgatgaaattcttgatgttttctcatgctttcctttctgtccaggaaggagtggaggccctggtgcccggcccttggtgctgagtatccagcaagagtgaccggggtgaagaagcaaagactcggtgagtgtgccccacagagtggccaggagcaggggtgcacaggggtcctatggaccaggctgagcagcttggatttgatgcagggtcagtggagagctatagagggggtgtcagcagggggcatgacatgatccagtgtgcactggtgagagattgtggaggcctggaccagggaggcagtgacagaagtggagagaagggatgtgagtgctatttagggaggtagagtagacaggacgtggtgaaggattgaatgtggggcatgaaggaggggaggtgtcaaggatggtgcctgagtttctggctggagtggatgatagaggtggatggggaatgacatacagctcgtcagctactgtaggtgtgaaataggcttccgggtgatgtcctgggacttacaccaggatctttcttctgcttctccattcrccacgtttctgtagaaaagactgttcccatcgactgtaggttgtcgtagaaagagcttggtgcctgcaggatctgggcatgtcctctgcatctctttgatgtccccttgttctcctctctgtctgttagaagcacagaatgggtgggctggagttgcagggaatgaggttggtaagttggtttagagtcagcatcatgggccttggatgtcaggctaaagactttagactttttcctgagggcaatacagcagcattgaaggttcttaagcagagaagcaatatccatgtgttgatctgtccattgcccatccgttcattctttcacggaacactgtctgaatgcctgctgtgaaataaagtggcaaacaaaagtgcagatttgcatttttatgtgctgaaaggtggcactggtctgtgtgcgggatgggttgggagtgattgaaggcaggaagcccaccaaagaggcaggaagtgatgaggtcttactaacacagtggcagtgaggatggaggcaggtcagattcaaacttattgatgggttagatgtgtgggatgaggacaagggagcatttaaggagggtttgcgggcttggtgactgacaacatggtggtgctgtccccaagactggacaccctggaggaggagtggaattggggcagatgagttctggttgggccatcctgagccaagagctcggtgggtctgttcaccctctgtaagctcctcgaaggcagagcctgtgactctcttgttcatcaccctgcccactgaacatctggacgggtggctgaactaacaaggctgtggaagagatgggtctggcctgggtaggggaaggaaatgtgtatgtcctgggtgtctcctggggtccagaccctacgtttggtgagatgggcactrgggttatgtagagggtgcagcaagaggggctgtgtcacaggctggaaaggtcagatggggagggtgggtgtagggacactatgtgtccctttgcctctccatcctcagatgatggtctgacctaactcgaagtccagtcttgccagaataggtacctgaaggtggagccctctgtcctctcgggaggccactagctgatggcatgtctggtggggtgcagatggggtgtgctataggacctgacttctggaggctgggtagggctgatgtgggggtacaggggaagatactctgagatcctgaggccaggcgccagcaaatacaggagttaagccaggttggagcttccttgggtacaaggcccagggtgcccacaggggattgggttctggggcaggggccaggtcaggctctaggctcaattggcaaaggatcttgttgtctgtgttggggtttctcagcctcagcaccattgacattttggatcagataacccttattgtgggggcagggcttgttattgtagggtgtctagcagcatccctggtttcttccccctagatgccagtagcatctccccgctttccccagtctcgacaatcaaaaatgtctccagtcgttgcgtaatgtcccatgggggcaaaattrccctgaattgagaacctctggtctacagcctcttgctgctttcactatactgtacaaacctggaaaattggggagggtcagtggggaagatggatagtgatgggccacttgagcagagttctgaggggtgagtgagtgctggggcaggagaaggacatttttttccaatagacagaacggcaggtacagaggcttggaggcacaaagttgggaaacagtaatccaagggggaccccagccccagaggaaggggcctggaggcttaggggttacagccgcaggaagatacctctgctggtcccctttggtcatttgcctccagagttagtctcctgctgaccctttgccgcctccaagtctctgcgacactcctcctaatctccccctccactcctcagtgagatggagaarctgagagctgcaacagggtgggactcagtccagctggtgggagccccgataccagccgtgggagggagggctgttcctggctctgctcacggattctggccaactggctggaggagggaaggcggcctcaccctcttccccacaggcccctccttccctgggtcaggggtcctggctgagactataatttattcccgtcataatccagtggttggtttggtgagagctggaaacatgttggttttcccttcccaagtataacaaggcctgtttccgcctccgcggccgctgctgcagtgccaygcggtgaactgtccaggacatgacaaaagggctcggttagctgcccgctggttagaagatgaacggctcagagctctccctgccgacaggctcttcccttcctgttgcccaagtgctggcctttcctcttggccgtctgctctgtagggccctggatacccctccttctgctcatgtccatttctgggccccagggtcctggcctggggaggtgagatgggggaggctacagaaacaggtggtatttggagactaattaatatttgtgaataataatgcatgcccaaggaaaacaaatcaatctgtgtttgcgtatttatgatgaggactcaggaatgatcccagctgttctccagccagggaagcscccatcacatggtcccttgggcccccacagaggctggcagggtggttagggtgggctgcatggaggtgacatggcttctgtgttttgcaacgtgaatcttctgtgacgttcatatgcgaatgctgtggcttggtctagtgcctgcttcttccttttccctcaaagcagtgattcccaggctctttggtttcacgaaccaatacaatttccaaaagtactcaagagccagacatggggttggcaattttttattttgccaagtaaaggcattataaaaaaacaactgctatctgctgtcyccatcatttcatacaggaaagaacattttaacaccaaggacaatatttgagaataaagcaagaaagggcagttggcagctttacactgacgtagcaaaggaaaaggatatattaaaaccattctgaatgtggaaaaattgtgtccaattatattctataatatcataccgtatgtaattgtgttcctgcccaagtatgtcagcttggcagaacggatggtccacagtgcaattcagagacgagcttgagtgccccagtgctccggccttgtttttatctcggttgttgaaagcccaggctcacccagccatgctggtgaagtgggtgytctgctgtgaacaccgttgcatggattcacaagatgctcaacctcgcaaccgcagtcaggctagcagcagccctgccccttgttcctctcccaccttctccccacaggtgaccctgggaccctgggactctgggggccaaggtctactcttgaggccaggcctggggatccagggctgctctgctctgatgagggaggccctggagctgggagtggcctgaaccgcctgacaccagggcaggctctgtgcccggagtctcagggcgggaggcagcttgctctcgccaggagctggtgagggagaggccctggctcgtacagctgtgtggctgccagagtagttgcctgagaatgtgtttgtgtgtgtcccttgtgtttccccatctccctgggcatctgtgtccttgtgtccatcatggaccactggaagaagctctctgttctactttctggatctgaacaaagtgtcctgagcaccccaacccagatacacagggggtttctggaggccccacgttgggggtagggttacctgaggcccaagttctccaacacccatggccagactctcatccaggcttgtaccacatgggtgtctattctgggagttttacccccatgatggctctcctgggagctctgcccccaccatgaagtctgtaacagcacgttacaccyctgctaatgtatggggagttgcacccctgtaatgtccttatcaggcagctgcactccatgatgtctgtaccctctgtgtccgcccacgtgatgtctagaccacaccattacacctccatgatgtctgcacctgggcgttatactgctatgattactgcaccaaggcggctacaggggattaagcctctgctcattgtactggggagctatatcccatgatgacggtgctgtgcattttattttcatagcagggagatatgctcatgctgggggcctatgtccctatgaagcctgcctggcaggggttgcatgcttggaatgcttgttcctggaagttaacctctgtgactattatattgttatacccgatgatgccggtacgaggccactgtgccctgtcctttggtgcaacacagctgttgagttataaactcatgtgtctcattcaggggctccaggatggtccatcaggggaccatacccccatgatgacctggcctggcataggataccagatgtgtccacaggcccagggaggaagagccactcatagtccaccacctgatggccgctgggaaggtgctccatcgttggctgcatgtggcaccatagcgcaagctcaggcagggccttggtgatgtgtgacctccatcccactgtggccttgcaggcgtcattgtggtctcagccacctcagctctgggatygtggagcagatccatccccagcttggtgtaaatggggctggacacctatcaacgttcttacttgaagaactggtgtaaatgaaggctggacacccttcaccgttcttactttgttgttcagctcctgtctcagatttttggtgggatcctgggacaggggacaactctcaccccttttcctttgtgtttggccccatcccactttgcattcccacctgctttgtccaacacctttgctcaactgctgccttctgacctcatgaactttgattatctcagttgagacaagggttcaaatttcagaaacgactggagcacctttgagccctgcccattcctggtcacctgccctgtcaccttgcaaattctcttactattgtgggtcagcggggacctgggtctgatcacaactcccctatcaaagtccatgcgtatcactgtggggccccaaggcgtgttcaccgtcatgcactctgctctgttgcgtcttcacagcattcatgagggatcgaccacgtctcacccctctgcccagagcatggtgtgatcagagcttgtgggcccttccatacatcccctggtgccccccaggtgaggggtatgggagagagaccctggggagctcaccagtggggccagggagtgatagcagcgtatctcccatgtatagtgcggccatgctagaggcttcacccaggtgcctgcaggcacttcaggccaggagccttggaagtaaaggcctaggggcattcagccagtcccagacgctactcagtctttttgtgcatagcttcctgtctcaaacatcagcccctgaggttcacaccccatcatccctacacttgtttggctccgggcttctggggcaagggcagaagagatgtgaggtttgaattctagggtctaacaccccattcctggccactgaggcctccctgtggtttctctgtgaagtaggaaggtgccatgggaatgggtaggaygagggtggccaggcagggcagcagcagcttgtcaagagcacgtcctggtgagcactgaggggttgtggctttggctggaagccyctgatacctggagcctgtcttctgctaacaagcctgtgttcaggggcctgtgctcagcgtgctcrtggagtctggcctcccaccttctccctccctgctggggagaggaggggcaacagaattctaccagggagactccagagtcagttggctttgcccctcactgctccttgtcactgtcttgtctctctgtcctctgtcccacgtaagcgtctctctgaccctgtttccctgtcctcttatgggggtgagttagaagctcaaggtttggactggaacacactgtacatcctctggtctcactcactccctgtacctcctactcaggtttagagaatggcccgaaggcctcctgcgctctttctccctccaccgtgactgttgggctgtccttgtgggtgctggggaataagtgaggagcttgggtggtcactggggtcagaaggtctaggtggtcattgcacagcccaagtggggggctctgttgaactaggctctggatggtcagtgaggatgactgggggtcagaaagcgtcaggggtgggcattagggacagcagtaaataccagctaactggctctgcccttctctccattacaggttgattgtcctgggctgtggctggctgtggagctagagccctggatggcccctgagccagccccagggaggacgatggtgccccttgtgcctgcactggtgatgcttggtttggtggcaggcgcccatggtgacagtaagtctgacccctcaaggtacagatctcccaggttgaaaggtggcatccttcccagcaggactctgggatggggacagaccggctactaggagagacagggtggccagaaaccctttagaccttctgtcctagagagcccccactgcttggagagcctccttctaaggaatacctgggtacttaggagcatctttaggcaccagagcggggcagtcgaatcgtgaccctgtcttatggggctggggtgagacctgtcctggattcatgtggtcattgtgtgatgtgcgcgtgtgtgtgctgtgtgcactgttgcagatctgtgctgaaggcacagtgtgagctacagccaggggtcggcatgggaatggggggtggcacgcagggcatgcgtatggatgtgtgcccaggacgcgggtgtgtccataggcccaaggagggtcaaaagcgggagccacccatagctcttcccctacgctggaccctcaggatccaagtatgcagatctgagcccctccttctcctttcatggggaccttctaggcaaaggagcatccccccaccccagctcctcagacctggaaatggggggaagattgtgtttggccggcaggaagctgagcaacgcccctctgtgtgtgtttgtgttggagggaggtggaattgtccccatccagatccaactccgaactttggtccctttcctgctgcccttccccctgcctggcactatgagactggcctcagcccgccccatcgccatggttaccactccttggttactggtgggaggcggggcacagggcagatttagccaatctgcaggctgagggggaggggcgaggtcggagccaaggtccctgggggaaggggccgttcccagcctgtccagagcccagrggtgatccagggccaaccctggggtcagcccacgggtcaccaggccatagggctcccccacctgcctccgtatctctgggtacagatctctccccttgccccaccagggctctttctcctaatggctcattaattattcaggaactgattctggagtggggtgggactggtgtggtcccgccctttgtcctcaagtgctgggtcctgggtggagctagaagggaaaggagaaggggcaggcattcccaaggggtggggcaaagggtcatgggagcaccaggtaccaaagagagggctgggcaggtgagagcaaggaaaaaagacaggtggggaatcacatggggaagtggggcaggggatctccaggcctggctggaacctgcaggggcaggttggagtagaaagccttatcaggtgtgacccacatggttggcaggaaggtgaaggcttgtccacgtgtggtcagtagctcttggacattgaagtactgtccttgccctccccgccgacccaaccccaggcactttcagggccttcagacaggagctctagggcaggggaaggatggcccagttgggcttcaacagataacacatcctgggagaagagctgccctcctcctcctgcctcagacccaacgcgccccaacctgtacccctcactctcatcccccagcctgctgtcttcccgtgttctctcccgtgaaaggcattaccacccacccggtcacccaagtcagaacctgggcctcctccagcctcctccctccgtgatatcccacatctaatccatcaccaagctccgttgcttctaccttctgaatatctttggaatgcatccacttctctctctaccgccttcatccaagccaccctcggctcttgggcttttgcacgcaacagcctcctgacggtttccctgcctccagtcttttccttcctaatccattctgcattccaaaggtagagtcgtgtcacaaggtgaaaacatcatcctgtcactcttcagtttagaatccttcattccctcccacccccaggcccccagggtcgtaacccttctataggccctgcattatcaagcttctatcaacctcatccctcgctgtccctccacccaccccactcacccaccacgctgacttctttcagtggttcaccaattcccagtagtaattggtaggggyaagggggaacagtttttaaagcagagaacctccatgctggttccttaggaaccaaagcccaaacaccaggtcttgayggtagaaagcagctgaagaagctgaaatcctgccttcttcaggtagggggttcaggggactcaggccttctcccaggcagagagccatggggcaggagcctgggctgggggtcagagtgaccgagccgcaggagccagggtctgtcttccaggcctgtcttacactgcacacagttttggatctctccctgcactgaggcagggctcaggctgagcttgggcaactactagccaggggcaagtggccatacacagacagggccactgcagaagatagggtaggcaccccagagaattgacagctggggcagtgaagcgcggagtggacaaatgtgtttcaataggcctcttaacragacaaatgaatgggggccctggcctctgaggggagtggagggaagcgggtggagaagcagctgccaagagttagcccagaggccccagtgtcagtgccgcacgcgcagctccagtggagatttgggcacacattggggtaggatctgctgcagcgcagcttccccagccaggctttgtggcttctcaggaggggaggttgtggggccagaggtgtcctgagccagggcagaggtttttgctgatctcaagtgcgtgtcgcgtgcctgtcttcaggcaagacctgcagtgtggaggcacaggcttgtgagcagtgaccacagggtgtgctgggtaggtggcactgacacaggccatggcagaagcatcttgggagaggagttgggaggcttcctggaagaggggagccctgaagggtgagtggacatttgctaatgggggggtattgcataatgaggtggggttgsggggaagaagcacgaatgtggctgggcttctctgtggaattcatgggagagccacrgtgagaacccgacagcatgggacagaggtggggtccgaagaccaggtgggagtgagaccctggttatggcccatttacccagaatcctaggagctcagagcaggatgcgtgctggctggaggggtgggtggcgggtgggttgacagaggtgggcagaggctgaggagctgggagtgtgtctgttgtgtcatttccctcctccccagagcctgtggagcacacagggtctgttgtctgtcgtcatgctctccccctcgttctatgggtggcctgtctagactctgctccctgtgggacttcccgcagattccgttgctttctctctctgggcctgttttcctattgcacaatggggataatcactcctacctggaaaggttaactgaggtcacatggatgaggygcctggaacctagtatgtattccccttatctgaggccatgacctggggctcttgctctgtccctgggaaccaggcttgtctctgagtgggctccaggggggtaccaggaacagtcacaggagctcactgagtcccagcttaagctgctcagacccagggatatctgtctctccagaagctccctgccctgccttcgccggccctcatggccctgcctccgtgtgtacatgtgtatgtgtattccatgggaaaggcacaaaatagcagtcagtctctccatagaagagccttgwtggtggcccagtttgactctccctggggctggacccctacagcctccctgggaggtggttgcagcccccttcctccagccagttccacttactcctttcttaggccacttcctcccaccctgcatgggcttggtggctcgagaatgttgccgtccatacccygggagctgtgctgaaagggctgtgcggcccccgaccactgtgtgtgtcagggagggggcacgctctcgtggggtgtcaggccaggtggcrgtgggtaactggcagaaaggccctcctggtgtgctctggtggcaccctgttgacccagtctcagaagttgtgttccgaccctcactgaacaccagctgtgggtcaggcacggggcagagtagtycaagtagcttggtttgctgcctgcctggggacctgacactgtgggatctggtcagtgctgggatgggaagctctgggcacctcaggccatgggacacagagcaggctcctacagcagcttggctgggtgggacatgagagaggggctgggctgggcacactcaaaggcagggaggagtctgagggcctggcctgtcagggtggcctaggtggtgggtccaagctgtgtgctctgcacagtgctaggcctgtactatagtaggtgctcaaaaaatacttgttgaaagagtaaagaagccgggtgtggtggctcatacccgtaatcccaacactttgggaggccaaggcaggtggatcgccagagctcaggagtttgagaccagcctggcaatgtggtgaaaccctgtctttaccaaaaatacaaaaaattagccaggcatggtggtgtgcacctgtggtcccagctactcgggaggctgaggtgggaggattgcttgagcctaggaggtggaggcggaggttacagtgagctgagattgtgccacttgtactccaacctgggtgacaaagtgagacccccctctcaaaaaaaaaaaagactaaagaaaagtgagcctgagagcttaggaggagcacatttcagaggggaacggagagaggaacatcaggcccgttggtagctgaggagaggtgcggttagatctgtgctccccaaagatcctctgctgaacataaggggcaacgccttgtctcctgtgctgtgtcctgcgggtggaggtggattggagggaagcggagggcgaggcctggttgaggggcggggcctgcctgtctggtcccccgggctgccttgggccagcytggcctagtctgttgggtgggcgggcagggtgcaggctcctctccagcctccaagggaggggagttgttctgcctcctcgatagccccaggccttgggcacagcccagcctcccacggctcttgggccctcctccttccaggccgccggtgacccacacctggctctcctccccggcgtctcctctccgcttctttgtttggagcggaggccccgccccaccccgcccccaggcgcactsgcccggccattccggttcagccggttccagcccccagtttctgccgctgcaggtcccggcaggagctggaggggcactttctccctgggtttctcttccctggtgcagcaggggccgcggtcctcatcctcctggttcctcagttcggtccttctttcattctccacccctgggtgccaggaactgggtcagacactgggacaggaatccagacaggcatgctatctgccctgcccagggttatgttctaggaggggaagcagccattaatcaaacaccaaaaatgtggaaaagtaataatctcacacgtgtgcataataaactgtgagtgaaagttataagctcggcaggtaggtaataagctaggagcagtgctgtgggaggcaagggagttacccgggagtttcaaactaggaactgagctcataggttgggggcagggggactggagaaggcagtgatacttaaatggagagcagaaggatgaatggaagttagagtgtatggcggaggttggcagaagcagcagcttatgcaaaggccctgtggctgcagggaacatgacgttgctctttagaggagccaaagctggggctctggggagagcagctgggtcagaccccgcggctttgtctgccataacaggtgtttkgagagtgattcggcaggtctttggagggttttgatagggcggggtgtcgggggaggctgtcagctcactctggacactgagtagagaacagacgggaggcgtggggcaggcctggaggcaggggcttccgcgtgttaggccagtggagtgccagtcaagggaaggtggtatctggactagggtgtggcagcgcaggtggagaaccctgagctgctttgtggagggcttcaagtgtgggggaagagtgcacggtatgggggtgggggacaggagacacccccagtggagcctgagcaggagagtcgtgtctgagagggtctgtctggaaggcgcaacagaggccaactttgcagacagctgcagtcgggagagcctggagcctccttcaaagggcattcaggggaagggcaaggcacgctggggggttctggaccttctgtggtgtcttcttgtctttctggtccctacagcctccctgagctggctgcccgagcctgccctaggcactctaagaacatagtcagtcccaaggtctccctccagggaaggccgtaggtgagcttaggagtgagaaggctggatcaaagcctggctccatgcctgcatccctctgacttgccagtcatttcaccctccgagcctctatttccccacctcttaaatggggataataatactacctaccttatgggattgcggtaagactgataatgctggtacgagtgacagcttccctcatggaaggcccaccacgtaaagcagtttacagccatctcattccatctatgacagaatcctgtgtcactgttttggagatgggaaaaaagaggctcagagatggtgagtgacttgcataataattacataaaacccccagagcccctggcccctggagttctcaaaagttccttctctgttggtacctgcagctgccactccctaccccgctcccatagaccctctcctccttggagactctgccccatctgccgtcccttctctgctggatcaacaccttttccctctctgctggctcccatcagtatttaaacattgcctttcatatctgtcttcaagaaaaaaagaaaaaaaaattcacaaacctcccttcccrcctcatcctttccagctgctggctgtatagtcacctgtacttccctctctccctcatcgcctcccagtcattctttggccttctttggtctggctttggcccccacccaccactccactgactctgttcttgtcaaggtccctgacaatcttgtgtgaactgttttgtaccaggtgtttgacagtcaaacatgcctgaattcaggtcccagatgtgcccctcactggcatgtgatcttggacaagtgacttgacccctctgagcctgtaaactgaggataatagcaatgaaggactaaagataaagaacctggtgcagagtgggtgcttggcaaaggattgtcatcatcgcacacgtttctgtgccagggaccaggctgggcctgggctcctggggaccaaacaggtggtctgaaaggtcatttctcacagcactagccctttttggagctgttcattggtctgattaataggaaatggatcagctgtcaagattaacgagctattgctacaagattgtagcaaatgggttgggcttctctgggttcatgaccctaggtggttgaattcttagggataggggctgtggactggccctggtatgtgtactgaggtgatgagggtgtggcagtgccatgtctgagcccctacctttcttctcctccctctgcctccctgtggacaccttgaggagactgtcagaaggcaataactaagtcgggggggagggatgggagaggcagatttacaggaaagcattcacctgggaagatatccagagagacttakgaactggactgtctaggcctttgggactgctgctggtatgtgggggctgggagagagggaggagtctcggttcctggccggagccccggggtggatggtggtgccatcactgagatggagagcagggggagggacaactctcagggagagctggagctcttcccagcagctctccagcacgcctttttcctggagcttggaattgatgtggggcgggcaacagaagggtgcagtggtagtgtgaactccagacttggaacacctgggttcagatcttagctctaccacttaccagctgtgtcatatgggacaaatcccttaacctctctgggcctctagaaacagatacagttatagcactcacctcatatgcttaacagagttaaaaaatgttaaactctctgaacagtgcctggcacatactaagcgctacataaaggtgaggtgtccttgttttctttgtaggtctttctctctgcccccatgactgccaccttcctcactggccattcctatagtgactgtgctgtggtgacttggtgtctccatctcttccaggcaaacctgtcttcattaaagtccctgaggaccagactgggctgtcaggaggggtagcctccttcgtgtgccaagctacaggagaacccaagccgcgcatcacatggatgaagaaggggaagaaagtcagctcccagcgcttyraggtgcrtctgtggtgggaaggggtcggcagggctcagggtctgcccacactctctcctttcagtgtccctcctcatggaccttttggaggtgggaggacaactgaccctgagcaggctcctgtgtcctgagtaggctgtgaccccatgtctgtcctctgacaggtcattgagtttgatgatggggcagggtcagtgcttcggatccagccattgcgggtgcagcgagatgaagccatctatgagtgtacagctactaacagcctgggtgagatcaacactagtgccaagctctcagtgctcgaaggtacgtgctagggagacgtggcacggtrggctgccgggctgaggcgtgggaagagccagccagccctgatcctgtcctgggcccatgtgcatttggcagaaaggaggactggccacctyggggtcagtgaaagtcagtggtggacagggatagtcattggatctggcctggattgtgcggcttatgctgaggccagccatgtggggcatgatgcctttgtattctcctgctgagccgggtcgttggttgggtggggtctggggtctgacttgaggtgtggagctgcagctgtgtatcccttgggttacgtggttatggctgtggctgtttggcagtgaaccggatttccatgtggagcctggccgtaggtgtcaggcaggtgtgttccttgttgcccctgtgagctgagggctggggctctgtccgtggattttagtgtcttctctcacttggtggcttctccattcattcacaaacactccctggaccaccttgaagtcctctgagcaccgaggaggaggaagctgtgtctaagccaagtcttgaggacaggtgggagttgggggtggcagttggcagctaggcaggtgcccaggcccagaagcaagagaggatggagctttcagagagctctgagtagttcaatttgggttttctggagggcagagggggagctagagagcacaggaagaaggagaaagcaattcagcatgagtctggagaggtttggagggcagattacacaggatctggctgagaaatgaacactctcctagggacayaggaagccacaaacaaggcgggggtgacatgatcagaccccagccacaactgattcatcagtctgaatgtgtttatgttttcaaaatatagcatcgattgttgcttgcttttttttcttttctttctttctttytttttttttttttgagatgcagtctcactcttgttgcccaggctggagtgcaatggtgtgatctcagctcactgcaacctctgcctcccgggttcaagcgattctcctgcccggcctcccaagtagctgggattacaggcatgcgccaccatgcctggctaattttgtattattagtagagatggagttttaccatgttggtcaggctggtctcaaactcctgacctcaggtgatccgcctgcctcagcctcccaaactgctgggattacaggtgtgagccaccgcacccgggccgattgttgctttctttttaagaatgtgatgtcgatacctgttcctttttgaaaaattggaaagtatagaatagcacagaggaaaaaattaaaatgtctcagtttacctctagtaataacatttggttacttactcgtggcccattttctgtgcatacatatatatgtgtgtgtgtgaacagaaatgggaccacatactgtccgatgatttgtagactgctttaaaaacaaacaaaaaaaaatatggctaacatcttccttgccactaaatattcttctgtatcattattctttttttttttttttttttttgagacggagtctagctctgtcacccagcctggagtcccgtggtgccatcttggctcactgcagcctctgcctcctgggttcaagcgattctcctggctcagcctcccgagtagctgggactacaggtgcgcaccaccactcgtgactaatttttgtatttttagtaaagacggggtttcaccatattgaacaggctggtctggaactcctgacctcgtgatccrcccaccttggcctcccaaagtgctgggattacaggcgtgagccaccacgtccagcctgtatcattatccttaatggctatgggtaagctgtcacatgsaagtaccctaatttatttagccattcccttattgttggacacatatgttctcagttttttcgtttctataaataaggtgccatacacgtcgttgcagatggatgtgttcaccttcctgattattcccttattctaggttcatggaagtggaattgctgagtcaaagggcacatgcatttttaagccttttgatatttccagaagattgtgtcaattcatactcctgccaagcagggcagaagagggcctctttcctkcacatcttccccactgttgggaaatatcttcaaaaaaatattttttgccaagttaataggcaaaaaatggcatctcaatttaatttgcatttctttgattacaagaacagctgcacatgttttcacattggccatttttacgctgtggctttatctgttcacacacacatctccattcagttactctttttgttgttgttgttgttgtttggttttggggggttttttagttttgtttgagacagagtctcactctgttgccaggctggagtgcagtggtgagatctcggctcactgcaacctccacctcccgrgttcaagtgattgtcctgcctcagcctcccaagtagctgggactactggcaggtgccaccacgcccagctaatgtttgtatttttagtagagacggggtttcaccatgttggccaggctggtctcgaactcctgacctcgcccgccttggcctcccaaagtgctgggattacaggcctgaggcactgcgtccagtgtcggttactgttttgcatctgtgtcttgtatgagtccgtgggctctacaagcttagaggagccatagaggacagtggttmagactctggaccactcacttctcgtgtgtctttgggttagtaactatgcctctgaccctcatttgctccatctgtaaatggatataatgcctaccacccaagctggtttggaagattgaatgctgtgtatgaagcgcttcccaggagtgtggtggtggttgctgtggggctggaagctgtacatcttgaggcctcaccacgtgagctgaaggtggttggcctccgtgctgygtggcatcatccgggtgatgcagctccactgcctgctcccacggggggacatacctgtgcaataggaactcagagaacaggccctgggccagcatcactgattgctgagtgttctcaggctcctccctgccacttctgacctgtttccccactcgtgacctgggggcaagtatttcaatgctgcccagtcctcctattggcagctgtcctagcagggagccatctgccctgccctggcatttgggaggtggctgaaggaccagaggccccagagggcttcttttcaggctctcagattggggaacagggcctccttgttagtattgaaagaggagtccttcaaaagcgcctaagccccaggtcctgggtcaggagccctcttacctctgccactgccctgggcagccttacctttcaaagggttgaggaggatggaggtggtctttcaggcctggggtgaggaggacggacttcagactgacaggaggggctgggtgtggtggctcacgcctgtaatcccagcactttgggaggcagaggcctgcacatcacttgaggtcaggagttcgagaccagcctggccaacatggcaaaaccccatctctaccaaaaaatacaaaattaactgggcgtggtggcgcacgcctgtagtcccagctacttgggaggctgaggcaggagaattgcttgaacccaggaggaggaggttgcagtgagctgagattgcgccactgcactccagcctgggcgacaggagactccatctcaaaaaaaaaaaaaaagaggacctgcaggaggtgcctccgtttggtttctctaccaggggccagcagtatatgtttgcgcttctggggtgtgagaagtgtctgatgaggctggggagagtgtggcgcaagtacccagaccctgtccatgctccggggaagggtgtggagctgtgggcctgagtgagcccctcctgcttctgaaacatagcaccaggaagacaaaatgctgacttatcctgctggtctgtataaccttggccagcattgggcttgacagaaaggcgtgccgcaggagggccagagggaagcarcccagagggtgaacacccgccccctgccccgcctcaccccacccctcccctccctcctaggaggatcaagaaagctgggtgcctgcaggaactgggtgaaaggatggttggacttggactggagctctggggtggggccggcaggagccagggccattcttgggaggccaccacagggtacgaggagggctggggaggggatggagctagttggggtcggggaagtaagagtccttcctgagttgcacacagctctccctgtgagctggtctccttggagaatggctgagggctgtctggggtgaactggctcaggtgaagatcagtgtgcccccaaaaaggagtccaggcctgcagtctgttctgtgccctctgcctttgcctcatgtcacaccaggcccaactgctgtggctccagggccactcccaccacagcccgtgggagtgcccccccaaatcccccacagccgtgccctttgcacctcgcatctgagcaggattgttattcccagtgtggcctccccttgacacccccgccaggactgcatacgaggtgggggtgcccagcacaagctggccggggtgagcctgtcctggctgtgatgagcgtggggcccgccgcccagcgttcctgtctgagtggtaattgaagccattagcgcgccagcctctccctcgccgggtaatggcaggaaaagctcttctcgctccgcactcttgaggcggcggctgaatcactccccctccaacccgcccgctgccgccactgagacagggaatctgacattttccctcaccagggagggggagccctgggggaggggagggaggcaggcctggattcctggcctttccctccaggaggttgrggggcagtgaaggtcttggagctcagtctgtaagtcatggattcacctggggccgcagatttcaggcctggaaggactggccgggaaagcccaggaggccgccagacattcagtggtgtggggagggcactgatgactttgggtaggttctgggagggacaaggaggcggggagaagaaagaagctgtggagcagagatgagctgttttggacttctcctggggggcttagctccaagggttctgagtacaggtagcattacttgtcttggggtcattgatagggcagataacgtgcactgttcgtgtggtgtgggtgccctgtgtgccatgtttaaggcagtgtttgtgtgaagtgtgtggtgcagtgtgtgcagcaggggtgctgccttgcaagctgtgcgcacagaacggggtgtgcagcggtcagcgcacacgttaccatcaggcagtggggaaggggcagtgtgtgcaggaggcactgcatgctgtatgggctgtgtatgcagcgcgcagtgtttgtgtgcacgtgtgtgcgtcaggcagtgcgtggtgtggtggtaagcaggtagtgagtaccttatgggctatgtatacagcaaggcatatgcatcaggcagtgtgtgggcagtaggcagtgtgtgtgtgtgttatcaggcagtatatgtgtgcggtgtgccgtgcggcaggctacctgtgtttatatcgggtagtgtgtgtgtgtttatgtgcagcaagggtgtgcagtaggtgtgcagtagactgtgtgcagcaggcdtgtgtgtgtgtacagcaggtggtgtgcagcaggcagtgtgtgtatgtatcaggcggggtgtggtgtgtgtttatgtgcagcatgcggcgagtactttgtgtggtgtacagcaggtggtgtgcggcaggctgtgtgtatgtatcaggctctgtgtgtgtgtgtgtgtgtttgtacagcaggtggtgtgcagcaggcagtgtgtttatcaggcagtgtgtggtgtgtgtgtgcatctttatgtgcagcgagtagtttgtggggtgtgcagcaggtggtgtgtagcaggctatgtatgtatcaggctgtgtgtgtgtgtgcgcgcgtgtgtacagcaggtggtgtgtagcaagctgtgtgtatgtgtcaggcagtgtgtttatgtgtgtgtgtccagcaggtggtgtgtagcaggctgtgtatgtatcaggcagtgtgtgtgtgcgcagcgggtagtttgcaggggtgtacagcaagcagtgtgcatggtatgtacagcagatggtgtgcagcaggcagtgtgtgtgtgtgtgtgtgtacaataggtggcatgcagtgggcagtgcatttgtgtgcatgcagcaggckgtggtgtgtacagcaggtggtgtgcagcagactgtgtgtttgtatgcatcaggccgtgtgtgtgtgcagcaggcagtgtgtgtgtgtgtacatgcgcacacgcaacaggcactatatttgtgcagcaggccatgtgtgtggtgcatacagcaggtggtgtgcagcaggctgtgtgcttgtacatgcagcacatrgtgtatgtgtgtkgatgtcagacaatgcatgtgcatgtgtgtggagtgyacagcaggtgatgtgcagcaggctgtgtgtgtaggtgtgcctcgggagtgtgtgggggtgggagtggacagcaggtggtgtgtgccttacaacctgtgtgggcagcagcaggagtgggcagcaagcagcccgagctgaagtgtggtggggtcagtctggcactggcaggaggtcggagatgctgtgtctgggctcattgtctctgggaccccgcaggatccctgtttggagctgttggtccgccaggaagttcgacagagttggatgtggccagaatggtctggctgagctgttctcagcacctgttgtggtcgacctcagcagctcctctgtagccaggccaggaggtggggtgcaccagatagggatcctgcccagacctgcctgcaggaggtcttgggaccctttcctctccctcccctaccccaccaagcccacagtcccttctgtctgttcccacctggcctcagtgtccakccagcaccataccacctatgccatgcgggccagggaatccaggtgtctcgatggagtgcctggtgttgccagccttggagcaggctctggggaagggctgtccggcacatgaagtagtgaccagggtgggggctaatcagtgctgtactgggcttggacctctgggttctgcaggagctctgaccctggctggctttggggctcgtgggatgacgaaggacctcttgatataccccctgaccactccacaacacagtccttttggaaatagccctagagacagagggtcaatgatagacatatgaccctgtcctgaggtatcctgggctgggctggaactggagcagagctggtgagggagcttacatttgcaagatgggtacatgtgtgttttctcaaggagtcatctctccctgctccacctccttccctgctccaaacctgtatattccttccacccatggtggaatgacttggcccaggcctgactttgatggctggggagttgggtaaagggctattgcaggcacaagatggcttcccaagtggcaagatgtgatccctttctattgtctacatgtgtgtctggggtaacagtctgctttggcagaagctggggctgtcaactacctgatttgcagcacagaggatgtagaagtggccccagaacctggaacccaagccagcttctacctctcccttagcaactgaggcatgacctgtatacccctggtccagctgctgtagtcctctgtgacctgtccttacacccccatgactgcagtagatttcagatccacgcagacatgaggttctacaatcatttcctggaggttctaggcctcagggatggggatgggagaggtattaagtaagttctcctgtttttattagctgtgatctgccttgaggcgcccaagtggattcccttccgaatgggtgctcctgtttagtaggtggtactcctgcctcttctgttagccatggacactgggcacttcccctgtgcccagcctgcccccctgcccctatactcacaggtacttgtaaggcccactgtacgtgttccctagcctcatgaccacggtggagccaatggctctgggaacaggctcaccaggatggcggtttaaatgcccaaatgccctgtgcatgcacattctccatccttggtaaggtgctccctcctactggtttgcttgctggggagagaggacttgtttttttttttgagatggtgtctgactctgtggcccagactggagtgcggtggcacaatctcagctcactgcaacttccgcctcccgggttcagatgattctcctgcctcagccttccgagcagctgggactacaggcacgcgccaccacacctgactaattttttgtatttttagtagagatggggtttcaccgtgttagccaggatggtcttgacctcctgacctcatgatccacccgcctcagcctcccaaagtgctgggattataggcgtgagccaccgcgcctggccctgagaggacttttttgaaacggagtctcactctgccacccaggctggagtgcagtggcgtgatctcggctcactgcaacctctgcctcctgggttgaagcaattctcatgtctcagcctcccgaatagcttgggattacaggcatggaccaccacgcccggctaattttttgtatttttagtagagatggggtttcacgaaacatgttggccaggctggtcttgaactcctgacctcaagtgatttgcccgttttggcctcccagagtgctgggattacaggcatgagccactgctcctggccaaattttaatcagagcaatgacgtgatcaaacttaagcttcagaaaggtccgtgtgggtgcatagtgggggctggaaggaaaccaatgacaggttgttgcagtccaggtgagtgatggcattggcgcaaatctgggtatgggtaggggaagataggggagcagatcactagaaggttagaaagaggccgggcacggtggatcatgcctataatcccagcgctttgggaggccaaggtgggcagatcacttgaggtcgggagttcgagaccagcctggccaacatagtgaaaccccgtctctactaaaactgtaaaaattagctgggtgtggtggcaggagcctgtaatcccagctactctggaggctgaggcataagaattgcttgaacccgggaggcagaggttgcagtgatatgagatggcgccactgcacttcagcctaggcgaccaagcgagactccatctcaaaaaaaaaaaaaaaaataagattagaaagagtagaggcctgcctggctacctgtaggattggggaggtgcaaggctccaggttcctggctctggggctgggtaggtgggggtrccatttctaagattcatgtactagaggaggaccaggtttgaggaggcgagttggtgagtccagttagaaatctgttgagccaggtgtgcgcaggcatccagggaggtgtcaaagaggcctcgtacacatttgcctggcactccgggggacatctgaagttggaatcttacaggctgagaaatagcaaatctcaggaggccagagccaggacagaaggagccccaggaaccgactctccatgttgggaggaggttcctgagagactggagggaaactgggagtgtgtgaggtcaagaaatgccaagagaaaaaagtgtgcgaaggaggaggagtggtcagcagggcggggtgctgccgagaggcccggcatgtgtccttaacagttagttcsgtggagccattgttggctttggtgttgggagacagcagggctgagaagtgagagggaggctatcagtgtctgtagtgactggaagggcccgaacctagggagtgaatggatgacaagagtctccctggagtaggactgaggttggggagccactgaaggagagtccagtgtgggcccgagtctggaactccagtgtgggtcgggtgtatgcgcagggcatggcccctgggttcttgtggtggggaggcctcaactgggttgagtagggcgatgtggggtgccagggaaacccgaggaaggaggggatgactgggagggggacgccgtgcctgccaacaggccccaaacagctcagattgaaaaacaaaacaggcttttaagatgccaagtttgatgaaatctgagtgctggaagaggtgggagtttgctcttggaaaaacagctgaaaatcgagactcaaagctgcgaagggagatgggcccaaggctccccaggccccccttactgcctggaagcctgggggtggggctgggctctctgggagagtgtgggagcgtgcagatctggcagccttcgacttttggaaggcgtctggctctggccctgctgaggatggagctgctggaggtggccttggcttctgtggagcggctgaagggcagggggagccagcagccctgccacctacgaggttccttcatgtgtctcgtccctgcatgtgtctccaggcgcacgtgttttggcataggtgtgtctggctgtgcatgtctccacatgtgtgtttgcgtgtctctgtgtgcaccgcctctggatctgcttgcatgcgcctgtttccacaggtgctagtcactgcaggtgcccctccacatgcacatgtaggtttctatttttacacctgtctgtttctccatgtatatttctgtgggttcctggctgtgcatgtttctatggtgtctgtgtgttgagaggcagggtgaggccaggcccaacactcaagcttaggggaggcggtcaggctcacagacggtgccaccccagggggcctgtgtctgtgtgtgcgggtgcgtgcctgcgtttgcacggagacgccacgaagctgggtaaacatgggtgaaaaggtcatactgacagacggtgctgcctgccccaggaccctgcaaggcgtctccatctgtcagcttccctggtgcagccccctccctctggcccagagactcaccctcaggcgtccaaggctgagctggacaaagagacctgtgtgtactttgtagggggcctcagcagcctccacccccatcttaggctcctctgtcaggaccccaacacatgccccagctcccaccagactcgccttggtactgtcatcccaccaccttcccccacaacagcctttacaaaggcagttttcccctcctccctggaaagctttctgcctcccatgctcatgtgtttcctgttcttgaatctccctcctccaggaagccaccaagatagcaagtgagctgtggagtcaaaccgatcagctccaacactgctgtgggaggttagccaagcgctcatccacttctgaaccttggattcccaccatcgacccccgaccctcccctcgctagggcttgtcatcgtcttctgcccatggggcaaccaaacctctccacggaaggggacaggtctccttgctgcagtgggtaaaggccagcgcagttaggtgcaggaggcattcacacacacgtgcacactccccaccttgcacacatatctgcgtgagccggggagaccctagggaatgtgtgtgcatgttgtctatgcatgcgggtagaatccgcaaacggtgtggagactcgggctcttgggtacctctgaaggcccctgaagtccccatgggcttctccttccgtccagggcaccctcttatcaggccatggccctgagacgcgtagtgcagacgcccccggcgctgaggctgaggaggcagatggcccctccccgcactgtgcagggcacccggttgggggtggaggggagggccgcgtcggtgaagcgggaaagcctagtgggaggattccctggagctgaggagccggggcctgggaaggggcgcagaggctccacccaggcgggggcgggaagggcggtgccrgggcggacagcggacgcgcgcgcctgcacggactcgggcacacgcagcccttccgcggcagcgcccgccgctccaccgtcgccatggctaccggctggcctggagcggggaggggcccttcctccccttcggcgccaacaggaggcgatttgaggggactcagygtgactggtgcatcccggggttggaaaatgggtgggtgcttgcgactgtccacgtgtgggggaccctggggttcgctttgcggtagatgcaaacgccgcggcgcgtgtgcggggctctgcagtggagcctgagccstgccggccgaggcgtggtgtgggggaggctgccggccctctcgcgcgcggggtgttcacgcctagagcgctggggctgggggcctaccacccggtctcctcccagccccacctccgatttagctgtgtgaccttgggcaggtgtccagatgtctagatctctctcagcccctggttgcccatgtacctcataagggtttggtaaagatttaagtcattttgtaaagcattttaacatagtacctggaacctagtaaatgcttcataaatcttactgtccctcatacctgggtctcagttttcccagttgttgatgggtttggagtgatcatgtgacatcatctgaggagttgcccaggtcctcagcctgagtgttgaggctgcggtagacccagcttccgcgggtgcccgtgggggaaggtggtaagtgtgccagtctggctgatagatcagtttacaccaggatgcccagtgctcagccaggccaggcgcatggtgggcgtcaggaaagggctgctgtacttggctgagttgaatgttcagaggcgcctggatgggagagaaggaagaggcagcagcaagtcgctcctgaggggctggagccctcctgtaagacccacttcccttcccgggtggcagagtggcagacttccgagtgctgcctagaagcctagttggcacaggggactggcttttgggtcccgctgttttatggacagctctccacacattctggttttaggctctggcggcagtgcctgagggatgatctgagccaaggacagagccactgagggcgtgataattgagggaggaaaattaattgtccttaatttggcgtaaatcccaaagaccttcctcgtgtaaggaattcagagtagattccgagacacagggctgcacacatttgtacttcccttcccttccctatctgcgggtggagatgaaggccacttgactcctgggccctgactctggcaggccatggccacgtcttccccatgagctgggcaggtaggaatgaggtcttgaaagagttagactggtgctctggagggcacccaggatggccctagcagccccgagtgtccccaggtgttggggaggtgagccctgcacctctggtccccctcaggccttcctatggaagcaagcagcagctgggccaaaggaggctgatcccctgcctggtgcatctcagtcctcttcatttccgtcctccttcccttctcttgccactgttgaacattttacttttaaaaatctgaaagggcactgtgggatcatatttacagccaaggagacactgggtttatatccagaacttctagggctgcaggtggggaaacgtacagccaggtcccaggaaaggctggggcggcaaggccgtgctgggaatcctattgctctctagcctgagacctctgctcctcatgggccacagtccctttgggatgtccctggcagctagagccttggggagcatcccctgggactggcagcagatagataggtatcttgctcctgcctgttggggctcgtccaactccctcttctacccgccccccagtcgctctccctgggtctccaagaggctccagggagggctagtttctgccagcctttaccttcttcatgtctgaggatgccatgtgcctttactctggcatagaagcctgacttcccttggcacatgttcccatacacccatcttgtgctgggcttgtggaaaggaggtagagtggtgctggtctcccccaccatgagcccagctccccgccttccccaggagacagacaaagaacacacattccccttgccccacattgggtgtgtctggcatccacactgggagagacactctgctgaggccttgaaaattggtggtttgggatggggcctggtggctcacagctgtaatcccagcactttgggaggccgaggcgggtagatcaccagaggtcagaagttcgagmccagcctggccaacatggtgaaaccccgtctctactaaaaatacaaaatttgccgggcgtggtggtgggcgcttgtaatcccagctactcgggaggctgagacaggagaattgcttgaacccaggaggcggaggttgcggtgagctgagatcgcaccactgcactccagcctgggcagcagagtgagactccatctcaaaaaaaaaaaaaaagaaaaagaaaattggtggtttggtcctagtgggaagggcctctcaccagcctagagtggaaaagggagttcccgactctagtctcaatacctgtctgccccagtggctcagcccttactagttacaccagctaatattcactgggagtgaattcygcatcagatgctccgcaacaccttgcatgcatgatcagatacagacctcacagtagccttaccatcaaggtgggcacttgaaccctgtgtacagataaaggagacaaagaatgagtaacatgccaggccctaaagctagttcgtggtgaacgtgggagtcccatttgatctatactagtcctgagcctgtcctggacttgtgcttccaaggggtggagagtagatagccttgccctgcagcccctcggggctgatatgggagcccatgtacagtgggagtgggtttgctgctgacatctgttcctcttactctatgctagtgactcctctgtgtgccgccaacccctagcaagctgggagaaggcagccaggagggagttttttctccccctaccaactttttgtgtctttagagcttttttatctcctttgcctccacacactcaggcatggtctgcagccctgaccgtgactcccagggtcaggactaagtgagggagaaagctcaaggtcaaggctgcagtaacgaataggtcaaggtcaggatcggagttagaaggggatcattggtagggctgggggtgccccgggtcakggctagagaccaggcggtgacctggggctctgccatgtgatagagctgaaggctggatgaagggaacactgtgtgtgcggacaggggagagggggctggacagcacagaggccttcaggctgagctgtggctgttggatgctgcgcgagctccctgctagcccccccccccaccccctgcagccccagcattcatgcagtgctttctgctgtgaccagcagagcattgattctcgttcttctcagggcctggagagataagtgctgacgccttcagtctgaggcgttgcctctcagacctggaaactccctgacagggcaggggtgggccccactgcagcctctgccctgccaaagagacttrggaccctggttcctcaaatcggggtatgcttcatgcttagaagtcaaggaaaggggaggggagtcttgagggccctggccaacctgcagttggggaggttacccccagaggggtcatagggggcaggcagagccagccctaatacacacattgctgtttgtctgcagaggaacagctgccccctgggttcccttccatcgacatggggcctcagctgaaggtggtggagaaggcacgcacagccaccatgctatgtgcygcaggcggaaatccagaccctgagatttcttggttcaaggacttccttcctgtagaccctgccacgagcaacggccgcatcaagcagctgcgttcaggtgagcagagggcaggggtcaargggccatgcagacctcagaacaagcgtcttgtcagatcccagcacagcctactcccttgggcctgggcacctccagggctgagcggagggtacctggtggggtgggctgggtcttactgcaggtgtgcctggctcagggaagagagctcgtggttggctgtgccgttaccttcttcggattgtcagactccagactttgggccagttctgcccctcccagcacatgtgatgtgccagtgtggtggactcttcaagggtgctctatggatgttcaccctcctccttccctgtagcctggcctgagacagggcctggatgatgcttctctttgcttcctcagatggcagggcttagctgggaaaagaggctaaaggtgcctgattcatcaggcttcaaaaggctggatctcaggggcctggaactaaggggacttgctgttgtccctcgaccaccagagccacctgtctcctctggatgtctccgtcgagccagctcggagccctgggagcaaggatgccatcgtgcaggagggaggtgtcaccccattgatcgatctgcctgtgaggctcctgccaggataattgattcagtttttgtgggaacagagcaggcrggaaaagaggctcagaatcagcttggctgcattctgcatctgctgccagcacggcctggaccaatagtctttgcttcagaagccctcctgctagctatgggatggttggcctcgggcaggatggccagtgccggccagagccccttctgcctgtcagttgtgatgtcaatgatgaaaaggaggacatgactcttgcccctttcaggggcctgcaggcttcagaggtgccctcccactccctgggatgccagcccctccccatcaattcccaccagcctcacagccccttggtgcccagcaggaggagggagagacaagctgcccagcagggcaagattctggccccagccacggccgcctgagacagcccacgaagtgttagctcatttaatttaattaaaactcaacaagatggaggcagctgtagcgcagttaattaaaacagccataatcaaggcagcaaacggccggcagtgtttgtggccgctgcccagcgcagcacagcggccagcacggttcggctcctctgcattttctcatagttcctccaggcaggctccccaagcagccagaygctcctccctgctggcctgggcccctccacagaaccacatggacttgtctggcagcagctctgggaaggctcgctcacacattggttcatctagtatttatatagtgcttggggtgcccggccctgggccaccccttccttgcctatcactccactggatgccactcaggccccatcctccttgtcctctcggcagcagctaacattcctccctccttcccaaccacactcccatttttccctagcctttcagggctctgtctcttgcgacttccctcttcctagtgccccttccctgcagcagcatcttcccttccaccaagccctgcctttgccctatggacacagccttgccctggacgagctcaccccctcctaaagctccaactgccatctcctcacctgcaactctagctttagtctttccagcccaaacctcttacctgagctctagatccaaaattcgacctgccttctggtcaccctgaccagtggtgatcagtgatgagtgatgaccttcttttcagacagctgtaccctctttccataagtggcaccctccaacctggaacatgggtctcaagttggtttgagagctctcaaatgtaccaccctcgtggctctcaaattggcccccttctcccctcctgctgcgtcagtcctatcccaggcaccagacactgctttccctgcctccgggccctcccgagaatccatcatcctgtaggtcaggtttgctgctcataccttcctgtgcctcagtggtgtctccttgcctacctggtcaagtgacgctcccaagcaaggcttagagggcccttcttggtcttcccctgcccgtgtctcatcgggtcctggctacaccacttaccagctctctggcattggttaactttttcgtgtgtcagttttctcatgtttgaaaaggagttacagtaagcagtgagtgagtcaatggcagtcaaaccttgagttgatggcctggcctctggtaagggcttcatggagctctttctactttctgtrcccttgaccctcctaacactgagctgtgctgacccgtccttggtccttgcccacctccggccctctgctcaccttccggctgctccacttgaaaacctccaccctgctcagcctctggctgctgcctcaggcctcaccttgctttacattgtcaccatctggctccagttctgctcagctaggccttgcagggagggcctgggtctgatcacacttggtgaggtcagctgtaggacaggtcttctctgagcccttgtcaagtgaatgatttcatgaacttgacctttggcacttgtccctgtaggctaatatctgctctaatgttcactcctccttctgctttccaggtccaaggaagacttccttatttgtcttcctgccacctggaagttgtgacytcagggtcgtgggcccagggtccagctcctgggatggagccagatggcacctaaggggcctcaaccatcccacctctgcagtaataactgggctctctcccctccctgcctgacctggcctgggaccgttggcctcagttgttgctggccttatcccattaccatttagaagggtgctaaggctattccgtgcacatttttcagggacagcccttcatggagtggactcaggcccctgagcactcagctgtttaccgggacctttacggtttacgcatcaccgacagtttacaacagagctttccccgcttttgttgcagctgattctcttgcagccctgtgaagtaggacaggctgtgattaccatgcccccttcacagctgagttaagggagtcacttggggtcacacatcgagactcggcctaggagctcccctgtgagatcacctcaggacctagtatcacaatagcaaacctggggacctgaggagcagctggacccttctggggcttcagagctgcacattcccagcttctccagaccccaggcccccactgaccagtacccagaagtcctccaccatctgcaacctgagccacagcacatctaaccagggcatgaccccccaagtaggagctggacaggaggtagctgacggcatgcgctgcccagatgtgagctctgctcagcaggccttttcttctctgtagtgatgtgacatgctgccaaaaccacctcctggagaattggaayttgagaccggggtaggcccaggaggaacaggaacaagcttatagagtggaaatggagttgtgagcaggggctcagagcccctgctgggtcctgagaggagctgttggcctgcaggctgtgccgagcctggacagggcttgaggagattcccgcactcctgctgtggcctgaacatatgagctgccatcctttgtcgtagaggacagcctaactcactaagtccatgtgctcatccagagagcagtctcttccccaccmccagcaccctgaggcgaaacctgggggtcttaagaagagatgcagcatctggctgcaggaggaggcccgtgggtgggacgcagagggcttgcagcccctcaccctgctggctggccccagctctggctggaagagcctgtccccaccccactctgctctgccatctgcggggcctgccaggaaggcacactgccagtgcatgctcacartttccctttggcccagagctccctggcacctcttggacacgaatacacccctaaggatgctgacttytgggccccttcagtcccccacacccatcttgtgaaatggaaaagtcagattctctgtttggtggggaaattactgttagattctttcagaataggttaggttctggaagagctgaggccaggagcgagggatgccagccctggaccatatccactgctcccacccccaccaagtcctggcgtggatgacaggagatcagcaatgtcaactttttggtctcaggacctctacttgtaaatatcagagaacctcaaagagggtttgcttgtgtgggttcttttttttttttttttttttttttttttttttttttgagacagagtttcgctcttggtaccyaggctggagtgcaatggcgcgatctcggctcatcgcaacctctgcctcccaggttcaagcaattctcctgcctcatactcctgagtagctgggattacaagcatgagtcaccacgcctgggtaattttgtatttttagtrgagacagggtttcaccatgttggtcagactggtcttgaactccgaacctcgggtgatccgccygcctcagcctcccaaagtgctgggattacaggggtgagccaccgtgcccagccattgtgtgggttatttctattgatgtttaccatattagatattaagactgagattattttaaaatatttattaatgcattttaaaataataaaaacctattatatattagcataaataacatttttaaggaaaaatagttatttttttaaaacaaaaatatttaccaagagggacaacattggtttacccttattacaaatctctttaatttgggacttatatagaaggcagctggattttctagctacttttgcattagggcaattgtgatagcacatgtcatgtagcctctgaaaaactctacgttcatgagagaaagtgtataaagcaaataatttcttagtattatgaaaacagttttgaccttgcagacctccttatggacctcctgaaagggtctcttggagagagagaatcattgtgcggattcttcccacataaccctcactcccaggtcccagcctttgccctctcccctgcctctgcatctgcaggactggcagcctcatcctgtgggcaggctatgagttagatggaccttgtcaagtccttccacttcactcacaagctggtgtgaccttgggctttgagtaattccctgaatgtctcttggcctctgttttctcatttgaacttagagatgaagaattcctctaggtgctgttgtcaagttccatgaaacggattggtgttgatttttctgcacacttcccaatccccagacgtgggcaggaagcaggcagcagggcagggtagacgtgggctggacctgggcccatctgtgggctcctcactcctctggggaaggcagtggttgcacagggggcttgagcctcagagaaggtacctgttggggatgaaacccgctcaaatctcytaataggcctggatatggagggtgaacgcctggccctctgggttaccaaccctcagggttatgaggtgctagacaggaaaagggtgggccctgatctctgcctctcgccagccaggccaaaktggggaagttcagtagtcccccagtttttagcagggttgagtgggctttctagggactctgtctctgggctgtgagtttgctgagtcctgctgcccgttcctctcggctgggctgcgtgttgtgggaggcccagtgtgctagtagcccatggcaagccctccctttagcctgtgtcctgtctgccttaacaccaggctttgttttggtaagtgctttgttttggaatcttacccaccggtgggatttgggtggccctgtggggtggggttactacctcttttcttcaccttccccctccattggccccagccagtggggtctgcaggagtcctgactcacctccctgattctcgtcacccccagccccactgagccccctcctcctccccagagcagagccagtgacctgggacacagcttcactgacactcagtctggctctgcctgcttgctcacacactgtccgtgtcggcctaactcaggcctcaatttctccatgtatttaaggccctttcttgtgttttattttacctgatttggctttgtgtggctttccttccttttatactaatgcttctctctgatcttatttgcattcaaattacctcgccaggtggttcaccaatcagaggtaagaatgctgtccgtgcctctcgccacaccacgccttgccactgccgtcacctccactccatcccgtccagtctgtcacctccccatccccatcccaacctcttcagcctcctcatctccagctccagcacccccaacaccaccggccaccacacacatccactctcagtcattccctcctgtggactcatccattgcaagtctgaattgtgaagatactcgccgggccccgcctaggacagcaagccctgctgcccaggccttccaggccatccccacagaagggaccccatcagctcctactgtgaaacttagcctgtcccccggcttccctagacagaagagcttcccttgaggttgaggagtgtgaccaagccttgccttttctcttgacagtctcttttggggggacctcaattattacttgactttccctttagtatcccggctctgtaccgtggtagaatgaggatcatcccttcagcctggcaaggattaggaggaatgttcacttaagagttctgtgtaggtgctaggatgacaacagggaggtaaacaggctcgtgcgtaactccatcacctgacctgtcagctcggagtccccgctaggctgcctccacgcagcagggccctgcagcctaagagttaaaagcacagattctggactcaggaagatccaggttcaaatctgacttaccacctatgtgatcttcagaaactcagttcatctctcagaagtgtatttcctctttaaattgggtcacggccacctgccgcacagggtcatgagaattagaggagaggaggatgtgtagtgtctggcgcagagcagacacctgtaaaatggtggcttgtctattcacatcattttctctccagttctctcagtgtctgggcacatctagaccttcagagctcaggaccaggatggtctcaggsaagagcagctgccttcctgggtgctatcttgcccatcacccggaggctggctcttgcttcacctgggagccccccaatccccctgcccatctactcagcctgtggtgactctttgttgtccctgctcctgggtcctggtgttggttccagatttggggatttctgtatgcaaataggcacccagtctctgttaggccccctgaccactcttaggctcttgttgcagaggaacctcctattttctgggtcagaaatttcacccaggaaccactttctgccccaagcctgtggcaccagccaccaggtctccctcaccccacccacacccccctgcctcactcaggtgaccttagggcagcctcgacccctcakcggcctgaacccgacctgcttgaaggaacattttctgtactagtgtccatccatcccatcagcatgacctgttgggtgcccatcagggctgctcttaaaggagatggtatttggcatgtgcactgggccctggtgctccctggcatctggtggggagggctgaggccagcaccaaagaggcaggctggtcctgygtcctgcattggtggcctcccctcttccttcacctccagctgccagccccctgggggttcccagtccctcctgctgccctgggttagatggtggaagagggacatcaggtagtgaggtggctataggtcagacccagggtggtacccctttgggccccaaccgtgagagcatgacttggaactcttcctctggctcctgtccagtccaggcagggggggcccggcagcttctgtccatgtcctgtgtgggtgtgattgtccatcagcctgggccctgggaaggtggrggctgtcaggttaggctggctgttctgtgcaggaggtggttttgtcagactgtgtcctgtgggggttcttaactgttggaccgtcctgtgtgggtgtaattgtctgttggattgttccagggaggggtgtgctgcctgtgcccgggggtgtgtctgtcacagacagcttgcccagtgtgctttcacaagcagttttttcaagtgtttattggtggggccaggggacggccaagtccagtggatccacccccaccttgccgctctgccttggcctcccccgccaggacctgtcagaactggcctcaagcccaagattcctccaccctttctgagggtccttttgctacccaccccgatcctggctcctgtctgtccgtctgcggccagagcagcccctcagggcactggcccgagtgagagctccaacctccattagcctcttgaattatgcaggagccgtggtgggtcgaagcactttagcaggaccgggctgaggagtggagctggaatgggtggggctggcggggagggggtggagtaggaggggaagatggtgctgggagcagaggctgctgggcaccaggcccccagggcaaacccattccttcctggtgggcggcaaattctcaagctccagcctgatgagggcatggcgtgcttgtgaatcccaggcccgccagtctgcaggctgctcccacacctggctctgactggcttagtggggctgcggggccaggaacactaacagggatgttgattgggaaataggctccagtactggcaagagtgtggcagaaactgaatggagctgggggttggggtacagtccctggcagagcaaaggtgggtcttgctggactgtggggagcatgagattgtgctccaaagcacaaccgttggttctagacaggaggccactgggctcttcagggagagcttcctggaagcagcaggggtgccagggtgtggcctggatgagcttcgacatctggtcaacatcagccacagatgctgtcgagacctctcaccgtgttccaggccacactcgacatgggccgtgcctgacctctcgcttygtgtacccacaggtgccttgcagatagagagcagtgaggaatccgaccaaggcaagtacgagtgtgtggcgaccaactcggcaggcacacgttactcagcccctgcgaacctgtatgtgcgaggtaaggactcaggcagtgcctggcccctgtcaccacagagctgtgctgcacctgccgggctctctgcccagagcccttggtgcagacacgcaagggactgccatgggcccagtctcttctccttcctgcttctttctgcagcagcagcaacagctcccactgggcaagttcctggcgtctgccactacttcgccttccttccttgcaggcccatggggaagcagccactcttgggagcatttgtatcttttgtaggtcttgccgcatgggcccggagccccatgggaatttggagccatccaatccgacttcttggtgtatgtgcatgtgtgtgtgcacacacgggcacacttatctgtgtgtaaatgcatgcatacctggcctggctttccttcagtacatcctcctgcctgccgcagcatggtgggctccagaaccaccatggctctgggctttggggtagtaaggcctcaggaacggaccaggccaggtgagcctatcctctggccaggtcttcctggagccttcctggaggaacccttgtgttcagctgtgagcccctgtggttatgttgcctcgggtgagcacctggtgtgttccagatgttctttgctgggagcgagtggacagtgtgctttctggaagtccaagttcccagcagagaggaacctggggactgttttggggtttccaatctctgctrtgctcacagcctaggggtgactaaagctggccaccttgccctttcctgagaacacactgggtctggtatacatgtgcccagaaggggccctgagagccccttctaccctcatactgtcccctcacctagccttcttgtacagatggatgtcattaaaagttaaactgttgrccgggtgtggtggctcacgcctgtaatcccagcactttgggaggctgaggcaggcagatcacgaggtcaggagatcgagaccatcctggccaacatggtgaaaccccgtctctactaaaactacaaaaattagctgggcgtggtggcgcgtgcctgtaatcccagctactcaggaggctgaggtaggaaaatcgcttgaaccagaggttgcagtgagccaaggtcgcgccactgcactccagcttggtgaaagagcaagactccatctcaaaaaaaaaaaaaaagtacaactgtctccacccaggggattgtaaaggaaagcggacatggctccttgcagtgatgattccatcacgccaagtgcttagcgcggcttcctgaggggtgtcgtctgactctccacccagtgcacgtggtgggtgatggcggtggcctgtccgactctttggggccrtgtggtcagacttgcttactcagagcagagagaattaggctgtcaaggctgtcaaccaaaatacacttatcaaggagttgctgtctgtcatgggagagggtggttctggagaggccacaggctgccagcccattcggtgaccagttgagctgcagaggaactatttgtggtgggcaaattgtgcttcagagactattaaagatgcttcatgagagttgggggcatgggatgggaggtcccctagcttactgtcaggtgtcttactcctcaaggctcaggcctcaggtcagcttgtctgtcttcaggaacaagagcctgaaaacttcccaaatggcctagaggagtggagttgtaagcggcacagccttggccccaccctgccccaggcagagtgtctggcaggcattggggctggcgagtccactccaacagaggagcagctggaatgacccttctcaaagatctgcctcctcccaccctgactatcgcaaatgctgtgctctctagagctctgctcacaagactgtagggtcgagagtggcagttccaggcctcagcaagaaagcctttgcatgtggctgcaccagggagaggagaggcccagtagagccactgtaaacccaagccagctgcaagggcgtggcctatgggcacatttcccagggcacagctacaggaggcagtgctgaggcagaagaaggcccagaggtggatggacccccgcattgtcctcttgactaggcagcattctctgaagtcactgttacactggccccagccctggaggcagagcagtgggtctctttggagatcgactgagctcagctgctgtagctggcagctcagtcactgcccagggagctcttatgtgcagccccttggagcatccctgtctgtggggctccctgtttacacatggtagactcaggcagggccctgactggctcttgccatggcccaacccctaactctaccagctcttcttgaatctacccttctggctccatccccacatgccttttggtaggaaatacgggggttcctttagttccagccccacttgccagggactccaaaacagccaaacctgacttctgttgtctctctcacacacacatacgacgttcctctaggccctgatgtctcaggaccgtttctaagctctgtccccaggacctgcctcatgtagaccctaattgaatctacaccaccctgctttgccaagagcaacctgccccataggccctactgtcctactgacaggacttaggcacacctgaaaggccctgctccctgggtgccttgcctctggtgcccccactgctcgtcatctcatggttggcaaaacccctgccttctgccctcagcagtactaggggcccttcagccccagcgcctggggacagcctgtactgggctgaccaccagctctgcatcctgagccctgcttgtgggtggatggccgtggaggagtccccagtgccagcctgctttctggcctgcaccccgtcccatctcccagcagagaggcttcgaggtttcctcccacagcaggctcctgagcctcagacggcttgatgtgggctctagccctgaacttctcagccgcagcactgttgacattttgggctggacgattcttagttgtgaggggccatcctgtgcatyggagggtgtttagcagcatctctagctcactagatgccagtggcacccctcagtcaaaacaaacgttgcaacgtgtcacctgggggaaattactgatggcttcccactgccattgtctccacccatctgactctcttcacctgtgtccactggcygcaaggcttcgtctcctcatcagacttggcttcggtgtctacctcacatctcccttctgtcccccaaattctcagggctcccagtgtcgctctctgaggccacgcgactgctacatttaatgggacagtacacgtgaagcaccaggcacattgccaggcacacaggaagcacttgctagtcagtagcctctgcagctagcactcggctactagtcagtagcctctcggatagcactgtggggggatgtgtcatccagttacatctgactttgttcacagttgcctgcagctccacccacagtctagcaggcccaggcatgctgggtgggccagagcctttctccttcaccacctgactctccctgagtgactcattctctccttccatctacagctctctgggtrtacagctgctggggccagggtggagccctgccctcctcagagcctggcctacctgtgccaggactaccagccttccccctttctctagggacctggctgcsgggccacagctgtctaaaacagggacagtgcctttytccccacaggtgcccagacatgctccttacaccggtggtgtgtgtgggggtggcttctagtggctcctgtaccttggcaggtttgtgggctgggtgggccttgaccccagagcccggtccacagggtctgtctgagctgtggggtgcgtgtgaggcatgggggcctgcctgtgccccattttcacctgccccggccccaccctcggcctccctggcgcctgctggcgggcctcagccctgtccaccatgtcctccatgagtcctgagtcttttgtgagtgatgtggttcgtgtgcacctgtgtgcatgtgtgtgtgcgagggggcacaggagtctcgtctcgtctccgtgctgtgtgggcagatgaaggttggcctgtttttactctctctgtgtttctccttgtcttttttttattccctcctcatcttcatcgcactctgccatcaacccaaactctcatctctcagatcagcgagaaggttggtccttttcacttcttatccatctacagttcgcccatcgatgggacacgcctgtcagtagggcccagcgggctcggtcagctccctcaggctcactgcgccgtgcctgcctgccagtctctgttgtttgggccggcgggcaggcaggaccagggatgggtgggcagacccctgacctgcatgttcctgctgcttgggtccctggtgcaccacgtgtctgcatgtccccttagcctggttcccctgcaagggtggtggggtgggcatgctgcatggcatgaaactgtaccccacctttgcacccaggccgggccagctgtctgatccaggcggtgctcaggaatggttgtggggggctgtggtcagagagaggtgtaagacctgtagcrctttgtgtgcrcctgtgggacctttcaccgccctcctcgcctagagacccaggctcagccgaaactactggaacattaaggcgagaggctagagcaggctgtcctcccagtatcctgcagcacagggcaaaagtcctgcagtgtgtaccctgtccttgaggccctcaggtcccccaccagggcttaatggggcagtcagccctggtctgcctcagggagcttggtgtccatggcgcagggtgagtagcgtcatcttggcaccctgaggaagtctcccataaggttgtcttttccttctccagccagatccaaattaagatcctcctacctgccccaggcccctctgcccaagcttcccagctagctcccgtgtctgtttgagggtggaatttagcccaccagccagctaactgacattccttagcttgatgctttgcattcagactcaagttgcttctacctggagtaactgaacggtcagctgcaacttagcaggatccatatgggagcctggaagtggcccctgactcagccacaggttaggaagggtttcctggagactgtccttgagcccattccagagcaggtctgtttggggcttggttttccgccccacccttggagccagacccccaccactgatgctggggttggcagcaggggctagtggtcattcatgtatcacatggtctgtgtggtcagaggagactcacctgtccattgggttttgggggttcaggatagcagtgtaggacaggctgagcctcagggagcaaacccaggccatcctygttccctctgccacatcctccgtggcttgagtttcctctgtgagggtgagggagccrgtcgagaggagggctatagcctmggctcagatatcagccctgagcatccatccatatgcacagctgagcactggggcatttctgttacaccattttgctgaccgggcagatctgcgagggcgtccagaaaacagtcatcagcagagacagcccagcccagagtggctccttccatgccccttcctctaccctcctggtccctcgtcccctcccttcccccaccccaccctatggtcccaccaaaaataagcacatggacaaatatttagcgggaaggcagacatgagtttctaaatattccagggggatttgccgggctggtaatttgtttggtgctgataattgcatcttacatttttccagctttacttaaaactgtgtgccgggtttgccggcatttaattactgctctgcggcagccacaaggttatttattaaagagttattttatcttgatacagtggatcctgcccctcatcccctccttaatgttgtgttattttcatcagagaaatttctctgagtgaatgcagattgcggggctgcctccccctgcgattaggctgtcactctactgaatgctgatgcctctgggcgccgcaccgccctattatagggggttgtcagcgcaaataattagacttaaaagttacagctgaaatataatccagaaatggcagggccctgttttggaaattgtctataaaatgtcagcactaaggatgcacagggaacggtaatakactggcattgttggagcctaagattagaccctgagtgcatttttcccakctccagtttttctttccctgctgttgcttctgtcaatagactgtccagggtgaggcctgytcctttttggaggccctgtgcctgcagcagtgggtggaggatggttggggctgctgcagtgagatgccagccactccagctgttggcatgggggtggctgtctgggcaggtctaggatgcgggtccctgttggcacttggaatacaaggaggttgtcccttgcctgtttcccccacccttcctctgtagacataccctgacctccctcacatggaaaatgtctcagtctcagtaacgtttctgcgtggctgaagcccagtgtccttgtgagagtgaaggtggtgtgcccaggagcctctggacctgaggcccttgcttggtgttgcaggtgaccctaaaggccactgttgacctctcacacttatgcctagcccctagagctctccctgccccctgcatctaggagggaaaaaataaacacaactcttctgtgaagcgcctcaatttcctgacagccgcaggagttggaggctttagaagacgtggctcagggcgttggcctgacctccagggctgatccatgaagtccgccttttggcctgaagaccctgtcctccagggacaatttgggggtaaagtccagtcaagtttctaggttggtgcccaaggtttattggccaaggacctacttccttctgctggggctctttgtcctggtatccaacgacgtgattaggccccatgattccaccaccgactggggtcaagcctgcaatcatgacctctccctggcacaggctgtctaaacccatccttacgcccgctggagcagcrtcctctcctgccagcctctgctaattctgatgcttctccccagagccttctgggtcttttttcaggcctgtcagctagggctcgaaagggtgacagtttttcatcacacagacctactcctactacgtatataaacttggycatgtgrcttggttttaaaacagttcccttgactgtaattggcaggtgatagcatctacagcmtggaaacctgcrcctagtaggtgcttaagcatagcttcccttcccatgaagaggaggagacagggcacccactggccgagaggacaggagagatttagttcattaaggctgctcctctgtgctgcccccacccygcttctgtggcaggcctggacctgatctgcaaacagacttgcctgcctgtgcctgtccctgaggcccatctccagagcagagggagggcatgcaccgctgggctgggtggtggtcctggctgagcctcctgctctcaccttggaccatttgaggtgcgtgctcagagagtcctttgttgccatgagacacttgccagccatgccccgggatccacctgttctgccacaagaactgtgtctgtgacatgctgtcatcattggtagagactcctggcactagaacagatgacagaaacccacttataccagcgtaagcaaaacaaggaagtcctgtgttacaaatctgaaaagtgtagtagatttggtgctgggcagggctagatccaggtacttaaacaggttggccagkcatttgtctgtctgtttctgagctctcctctcctctgtcgacatctttgttctcaagcagcttttcctgtgtgttgggagaagccatccccagctgctctaagcttagctacctcagtagagagagaaggtcgcttttctaatagtttctgcggaagtccaaaggctgtttctccatagtcagatctgggtcacacaccccatgtatgaagaatgcaggtagaagtggtttccttaaagacaatgggaatgctcattgatttgaggagaaagcagaaccctgaatgtctacaagatactctcatgccctaggtgaacctggggacacagatccagcccaccagcacctgtcaggcctggtctctggggctgccagggtttgggttctgtctggagcaccagagtaaggcaggctgtggaaggagttgaagcaagtgctaaattaggtagggtctcttgggctgggcagaggagtcactgggagccatgcaggagcttgttaaacagggagtggcatcagatttgtgccagctgtttgtggagggcccgtgagcaggaattggggcagtggacaacaaggcaggaggactgacgcagaacacattgcagcaactcagggaaggatgatgatggcttggactttggtggtggcagttgcctgtgtgtatggagagaaatacatggatttggaagatatgttatgccacgctgttgacaggacctggtgacttgctgaatgtctgatctctgggtctaagttttgacccctgtatggtgaggtcagacgttggaccgggaggtctctgaagttgcttctagctctagttctgtgatttggggctgtgtgagcagcatagtctggtgcttatagtggagatgctcyttatgtggtgctgtggggtctttgcatgcctgggccccccagcgagggtcctcagagaccagtgctctcagcagtgctcttgggtactgactagcctgctgcctgccgcctttggccctgcgtgtgagagtgcccgtgtaggacacaccctggcctctgctcaccagctgcatggcccatctgcatgccagacatgcctgcccacggctgggtttcatcacctcccttccctctgcatgctcctgtgtctgtgtcaagcttccaacttcgggggcgggtggttctaggctgtaccctggactgagaagctcagaacagcttctggtcaggggagtccaaggctggaggtcgtggccaggcacagccacagccacccctccccttgagacccttgtttgttggcgcaggaagccgtctgttcggcgccctcatcatgttactgccatcgtcatgcccatcctgcccgcagaccatgtccctggcctgccctgacccctgcccctccccagtcctcctgagggcagcccttttgcttgggttcccaggttgtgccctgagcatggctgagaccctgrcaggcggccctgctgcttgccttatttcttcccctcaggccatggcctggaggtggaggcagtgactccacggcaggtggctgtgtccctctggactggccttctgctctgcccagccatgctctgaggaccctccaccctagggcctgctttctctccttggtgctccagccaggagcaggcagagataggccctggagaacaccctgggttgtggtcctgaccaggcctggaccttgtactgagtccctgtgtgaccctgggcagacaggaccttcctgacaggcctcagtttcctaggctataaaatgggagcttggttgcaagatctctcattgagtaagtcatcgtgctccagacagtccctgagtgtgggggccacttctaggctggaagtgggtggggtgggagtggatgatgagctggggtctggcggtgccacccctcctgtctctgagcatgggtttggctctgaccagaggggcttcctgaatgaggggcccctgcccttccatgcagtcgtgtgtcctgcccggcctgtgagtgcctctctccctcctcctgcagtgcgccgcgtggctcctcgtttctccatccctcccagcagccaggaggtgatgccaggcggcagcgtgaacctgacatgcgtggcagtgggtgcacccatgccctacgtgaagtggatgatgggggccgaggagctcaccaaggaggatgagatgccagttggccgcaacgtcctggagctcagcaatgtcgtacgctctgccaactacacctgtgtggccatctcctcgctgggcatgatcgaggccacagcccaggtcacagtgaaaggtgagtgtggcaggtgctgtaaccagtgccctccctgtcatctgggaggtcctggtggtgggcgaatgtgagctggctgccatgggcacaggcatggctgagggattcttgccctttcctgggtgtccctgccctggggtcctccagcccttagagggagggagggatttctgttattagccggcttaatgataatagttaaggcatattgagtttcttggtgggagacatcatgctagcaagcacagttgattttgtttttttctgttttaccctgggagataggtgctcttattatttccatttttgaaacgagggaaccgaggcacagagagggtgtatcacttgccccagggtcacataaaaataaatgacagagcagggacttaaacccagtgtggtctgaatccatatctcaccctcaccactacatagtaccagaccttcaggtttaatagcctcccagcaagaagggtgtggtaaaatagtaggggaaagtgtgttctctctgccctgatacctggggacaggcacacatgtattacacatatgtcacatatatgtaaccgattctggccaggcacggtggctcattcctgtaakcctagcgctttgggaggccaagttggaaggattgcttgagctcaggagtttgagaccagcccagttaacgtagtgagacccccatctctacgraaaaaaaaaaaaaaaaaaaactgggcatggtggcacacacctgtggcccagctacttgggagggctgagacaggaggatcacttgagcccaggagggtgaggctacagtgacgcagtgagccatgatcacaccactgcactccagcctgagtgacagagcgagaccctatgaaaaaaaaaaaaaccagattccttcctggtctccccgctgcaattctcaacagcctctgatccattatctgttttgcagcttgagtgatctttaaaaaatgtaattcaggatcaagtgactcccttttaggaaagggagaaacaccttccagtggcttcccgttgttttaggatacagatcaggatcctcactgtggtctcccagggccactggcttcccaccctgtcacgcgccagctgtccagacacatgctgctttccgtttgccrtgctccttgcctggccccttctgtcactggctccatgtacccttccaggcctcagcttggtgatgctttccttccctcatcaccgcatccaaggagattccctggatcttactccacctcagcaccctgattcctgctgtccttgcacatggcagaatcatgagtacgatcgacttgtttattgattctctcttgtactgaggtgtaaactccatgagagcagggatgtgactgtgtggcattgtagccccagcacaatgtctggcattgagtgggtgcttgttaattatttgttgaatgactgtggactcaggacctttccacttcaatttgagccaagctgcagggtctgtggggccagcagccccatcactctttctatccgggccagtccctaaggaaatatctccccttcccctgcctattacacatactttccaccaggtgggctcaggtgacctgcagaggcacatagctgctacccagtctgggtgtctttcatctacatgggactgcaagggtcacrtcacctccaggtctgtttgttagatgagtctggtgtgctgatgggagggtccagtgaatcccacagttgatatgtgtacatactaaatgacccaaggccctgggtggggcactgacaggcctggccacygtccctcacttgtgccttcagaggtcaccataagcttttccagccatttttcaaggtaggctgtgggtatcagccacactcaggtgaccccaccagatatcctggataatccccaagtctagggttggttcctaaggatcttgacctcgggcagctttgagccttccactttgtctccagctcttccaaagcctccgattgatcttgtggtgacagagacaactgccaccagtgtcaccctcacctgggactctgggaactcggagcctgtaacctactatggcatccagtaccgcgcagcgggcacggagggcccctttcaggaggtggatggtgtggccacyacccgctacagcattggcggcctcagccctttctcggaatatgccttccgcgtgctggcggtgaacagcatcgggcgagggcygcccagcgaggcagtgcgggcacgcacgggagaacaggygccctccagcccaccgcgccgcgtgcaggcacgcatgctgagcgccagcaccatgctggtgcagtgggagcctcccgaggagcccaacggcctggtgcggggataccgcgtctrctatactccggactcccgccgccccccgaacgcctggcacaagcacaacaccgacgcggggctcctcacgaccgtgggcagcctgctgcctggcatcacctacagcctgcgcgtgcttgccttcaccgccgtgggcgatggccctcccagccccaccatccaggtcaagacgcagcagggaggtaggtggrggcatgccggctgggcagccaacrgcagagaaggggaggctgaggttgtggcggtgcctttccccctccctcggctgtgaggctgggggctcttgggaggatcaaggtgccgtattccatagatgtgtggtcagttgggatgtaggataagggtgtgaggttaggacctgacttcctcggctccctcctccctgggcacccctgacctcacgcagatgaggctgacctgcctggtgtggggtgttgcagtgcctgcccagcccgcggacttccaggccgaggtggagtcggacaccaggatycagctctcgtggctgctgccccctcaggagcggatcatcatgtatgaactggtgtactgggcggcagaggacgaagaccaacaggtgtgcagcgggcagagaagcactgagggggtctcctggtccctgaggktctgtgatgggcttaacccaggagggtrttttctggattctgtggcttatgtgggcacagcctctaaggtttctgctggaggcttagtggtgcatgcgtgtcatgtggcccgcacagcctgtatgaatctggagtcattgtcaccctgtgctaggggcaaagtccccagggtctgccttgggtttcctaggctctgtggctcatatgactggcwgagccctgaagtttccccagaagccatgcgtcccagatggctcctgtggtccatgtggtctgtgaggygtctgtggcatgggctaagccctgagttccttttgtgctccatgtggccttatggtgtggagccagtcctggagccgtggtggrtccagaggtgtcacattgcagcccatgttggggaacaacctgtgagtgactttgagctcagagctgtcagtgagtgctccctgctcttcccagcacaaggtgaccttcracccaacctcctcctacacactagaggacctgaagcctgacacactctaccgcttccagctggctgcacgctcggatatgggggtgggcgtcttcacccccaccattgaggcccgcacagcmcagtccagtaagtgtctcccaagtccgctgcctgttacacctgggctgggacacacacacacacatgcacacacatccttccccctcgaccaggcaggtggggtggtcaggtctgctggccaaaccgaactctggcctgggctctgagtctgggcctcgggagagggccaggtaagtgcctcccagtctgtccagtccaggyggctgctgccctccctgctccctgcccagcctcctgcccctcctcccgcccatgccccacacactgcccaggtaagttctgtgtctgtgcctcatctccgcccccactctgtgctggtcacactagcttagctgatgggccatcctcggtgggtctgccatgtcccagacctgctttggcggctgtttctcctccctatggccccgcatctcgtctccccatcacccacattcccttcctcatactccccatgaaagttacctgagagccatgtgatcaccctgagctgactgcactcggggacaggtctgagaatgcggccatgtgacccagcctgcccacgtgtgccttgaattgtgaccacgtggccgtgcaggggactgtctgcaaggctgtctgtgtgagactctggtgttgtgtgtgagagactccgatgctgcagctgtgggagtggcactgcccatgagtgtgagtgtgtgaccacacctgaccagctggctgtgcagcacctgtgtatgtgcatcagtggatcttgggcatgacccttgtctttgtgggcgactctggcctgatcctgtaaccgtrtttgtgggtctcggtagccccccagacagtagactgtgtgtgtgtgtgactctgtggttgctgctgggcgtcctgtgtgtggtcacacagccacagtcagctgctgcgtgagactctgtgtgatagggtgtcatggatgtgactggctgggtagcattgtgggattgagatggtgaccacatctgatgtggccatgtgatgaccagaaacatggcggtgtctgaagtggtccttatgaagtgggttatggtcacaaggtaagccaccgtgcctggctcttccatcctactttacacaaatgtcattaaaagctcatttggaggccaggcacggtggctcacacctgtaatcccagcactttggggaggccaaggtgggcggatcacctgaggtcaggagttagagaccagcctggccaacatggtgaaactttgtctttactaaaaatacaaaaattagccaggcgtggtggtggttgcctgcaatcccacatactcgggaggctgaggcaggagaatcacttgaccccagcaggcagaggttgcagtgagccgagatggtgccattgtactgcagcctgggtgacgagcaaaactccgtcttgaaaaataaataaaataaaaaagctcatttgggtaattacaggtgcaatgtctgtctgccctgctggaatgcaggatccccatgggcagacaccatgtgtctggtcatgctgccagccctgtaccgtgcatggggcctggcccccagctgcagcacagcaggtgcttctggaatgaatccatgaatacaaggtcacacacagcctcttgacatcactggtacatgcacatgtaccctgctcctgttcatttaccagttggctcccacccttccttcaggccttgggaaagtgtcacctccccaaggcctgaaggaagggtgggagccaactggtaaatgaacaggagcagggagcacacaggcctccgggagagtctgcaggcctgaaggccttccagctgcaaggcacatggttatggtcacaaggtaagcagcaggccagtgtggctgcagtagctgccggatctatggcagtcagggccttggggacacagggtaggcaggagagctgactctggctgctctgtgagaatggacagggcagcctgtgaggaagcagagaccggttaggaggctttgtagcggtccagggaaaagatggtggcgcaggtgaggtgatggcggtggatctgagaactgtcagggatgctgactggtcagacttggtaatgggttatgaataggggcccagggggagggaagtggaggtgaatcttgtttctggtgtattaacctgggaggagagtggtgctggcgtagaatgggaaatggggcagaggcaggtgtgaaaactacagctggtctcagacacccaagttcaagatgccrtgtgccatctacatggcagtgctcggcaggctgtgggaatccagggctgggctggagctaaaggaccctgagaagaaagactgcagatgagaggaaatcaggggaggggagcgacttggaggttggaaggagagaaagtttcaagaactagacgagatgctgctgagcggtcaggagtacctgttggaccgagcaacatggacgagtggccctggagatgaagcttggtgcatggtaggaccaaagctggtggatgtttcatgaggcctgtgtgggtgctgagaatgtggaggcagcaagccyagacgttgccagaaagtgtagctctgaacaaggggaccactatggctagagagggccgtggagctgagggtgggattttgttttgttttgttttgttttgtttttgtttttttgagacaaagtgttgctctgtctcccaggctggagtgcagtggcatgatcttggctcactgcaacctccgtccacctcctgggttcaggtgattctcctgcctcagcctcccgagtagctgggtttataggcgtgcccgccaccacacccagctaattttttttttgtaattttagtagagacagtgtttcaccgtgttagccagggtggtctggatctcctgacctcgtgatccgcccgcctcgacctcccaaggtgctgggattacaggcgtgagccaccgcgcccggcctgggatttttcttttaagatgggaaaatttcaagcatatttaaatgctattggaaacagtcaataggaaaaaaagaaaccgtggaaaagagggtaactggtggagccttgggaggtggagagaaggggaacagtatgggtggtgagagagcttagccttggacagggtggctcaactctccattctcatgggtggaaaggagagaattgctgcagatgcaagtacggtgggggggttgtagcaagagatggagggagctgctgtgaaagcctggtcttctctgcagtgtgggagacatggtcatgcgccaagaggaggcaggcaaagggagctggaggtctggggagcatggaggagggggactgtttcatgtgaggtggcagagcgagccaggcagggggcagaaacaggcagcatggagagtcctggaggatgaggcctctagggacgtgtgcataggacgccagcctgcctcagtgccgctgtagagaaggagggggagagctggattcatctagggcttggcagcggccaggaaggagcatggaaagatcaggaggcgagggaccttgcgatattggtgagagtgtggtaggtggtagacygtggaagctgaacatggagggtgggaaggacaaggttgatggacaggcatcctgaggagctggcgagcaggctcagtgcccggggcctggagtgactgagcaagaacaagggggtggggtctgcaaggggatgtgagagcccgtgattctggagggagggccatccccagtactggcagcctccagggcatgaccacagctgtgcaggggaggagaaagtcctggagatgaggggctctggggccagtgggtcaaggggctgctgaagtccccatggcagggggtggtgacagaacttgaagaggaaacctgtgcattgcagcagagtcctcggtgggcgtggagtctggacacatcaytggayacaaggagacacgtgtctgcctcctaattcccaaagaagctgttgagtgagggcacctctgttggtgggtactttttctccacgccaggggctgttggccttcatgtycggcctcctgttggtgattacctgtggcactggcaaagagactgtttccaggcaggcacaggtgaaggctgccttatgccaaaagggccactggggccactcttcctcggaagagcagaaccgtgggcacagcagatgtgaagcagttctccatatgtggctgtgtgtgygggtggcagtgggatggccacgtgcttgtgtgtatgtgatatcgtgtatgttttgtgtgagacagcatatgtgtgggagagacctygtgtgagagatgctgtgtcagaactctaagacattgtgtgtgagagtgtgtgtcagatgccatgtgtgagacaccaagacacgggtatgtgatactctgtgtatatgtgagtctgtgtgagagacactgatactccaagacattgtgtgtgtgtgacactgtgagacaccaagacagtatatgtgcgagacagcctatgtatgtgacagtgtgtgtgtgagacaccatgagagactgtgtatttactgtgagagactgtgtgagagacacgtgtgagacacygtgtatatgacactatgtataygtgagackgtgagacactatgtgtatgtgacactgtatatgtgtgagaccgtatgagacagtgtatatgacactgtatatgtgtgagactgtgtgtgtgaaacactatatgacactgtatatgtgtgacactgtatatgacactatatgtggagactatgtgtgagacactatgtatatgtgacactatgtatgtgtgtgacactgtgagagacactgtgagacaccaagacagtatatgtatgagacacyctgtgtgtgtgacacagcgtgtgactgtgtgagacrtgtgtgaggcactgagactgacactgtgtgtgaggctgtgtgagagtcagtgtgtgtgataactgtgtgtgtatcaccgtgtgtgtgtgtgagagagggaaggagagagagggaggcaggtcagagggagtcaggygtccttggcgagagtggcagcagcctgcctggagggaccctgggatggccatttcagcacctaaggggtagcctgcccgggtgagtctccagtccactgtgactcagtcattgtgcctgtgatccccaccctccatctgcttgcttcccccccatttgtcttccccagccccctccgcccctccccagaaggtgatgtgtgtgagcatgggctccaccacggtccgggtaagttgggtcccgccgcctgccgacagccgcaacggcgttatcacccagtactcygtggcctacgaggcggtggacggcgaggaccgcgggcggcatgtggtggatggcatcagccgtgagcactccagctgggacctggtgggcctggagaagtggacggagtaccgggtgtgggtgcgggcacacacagacgtgggccccggccccgagagcagcccggtgctggtgcgcaccgatgaggacggtaggcagtgccaccggggcgggaggggaggcgttctgcctcagacaccacccaccaagctccccagggccttcctttcctgaacacaggcccaggtcaactcatctttctggttcaggtgtaatggcctaaagtggggggatgtcacttacgggataactgaggcccaaatcccagcctttggggctgtctccaaagcagctgaaaccttcacaggctaagatgggagaagcagccctgtctaagatttgaaaggtcaagattgggcagattggtgtaaaagatactcaaagtagaatcagcaagactccacgttggctggacattggcatgattggggcctaggaggagtcaggacaggttgtgctgactaggggtggtcaaagacctggtgccccacctccacctgttcccccatgtcgaccctccccaccaagtgagaggcctgggccagaggggtgggcagggccagtcctgggctcttacccgtggcgggcagagggagccttccgtgtgcctcaccagggacagatgatctaaggaaactgtatcagggcctttcctgggggagtggggtgctgaggcaggaccctcaagtttgctgtgcccacctgagctagggttgatacctccaggcctgacttccttctctacctgaccccccagtgcccagcgggcctccgcggaaggtggaggtggagccactgaactccactgctgtgcatgtctactggaagctgcctgtccccagcaagcagcatggccagatccgcggctaccaggtcacctacgtgcggctggagaatggcgagccccgtggactccccatcatccaagacgtcatgctagccgaggcccaggtgcagcattgggtggtggtggggtggcagggtgagcacagaccagcatgcacaagctcccttttggggcccagatatgtccctcttcccctgcctgccctcagcagtgctgtgactgcstttccttggttgtgagacccgagatgctttgcagcatcaggggttaggctggggttttttgggtgtgggttttttgtttgtttgtttgttttgagatagagcttcactcttgtcgcctaggctggagtgcctcctgggttcaagcaattctccttcctyagcctcccgagtagctgggattacaggcgtctgccactgcgcctagccaattttcgtatttttagtagagacaggstttcaccatattggccaggctggtctcgaactcctgacctcaggtgatccgcctgcctcagtctcccagagtgctgagaatacaggtgttagccactgtgccccaccaggtcggggttttgagatgtgcctttcccctagacagtgctgggctggcatccactcttcccacagaaagggtagagagagtgctccagggctgtcttaccccactggcggccatgggtccgtggttgctgcaaagctctgtgagtagccaagtagagtgttgccctgctcctggccctgcagggaackattcagcccctgatgttcaccctcaagagctaggcctgctggccagcctcacacctccctctgtgcacatctgtcttcctgggaggatggtcctgcccttgagcttggggtgaggtccctggggtrttctgaacactggttgctattcagatgaagaacttggaatgctggggggttatgagagtggtatggaattattcagcaagtaggtggctgctgcgcttggatgagaagccatgtctgtggacccctaggaaagggccacagttgctgtcatgagccccctcccaaaagaccctgctggagagtcacaacacctggtgtggtgctctcaaggtctccctatccaggagcagggcctccccattgagcctctcacctctgcctgggtggagagcaggggtgcgtgtaccactcaatgctgtacacactgtgcagaggggtggggtcacccacacagacaggagccttattcctccagctgggctcagccatctgaagcaaaattctttctgcccagagggtgctctcttccccctctcagcctgcccagtgctaaggcatccggggtggaggaggcaggcatgtgcacccacctgcattcctggggcaggttgagggctccttgtggagcctcagtgaacacacctacccagaaacatcccaggaatgggttcccctagcccctcctctctgagggggccagtggccacagctgtggccagtggggttccagagaagccacttcaagtgcccccttctggtcccaagaggttcggaagggagctgggccagaggctcagggacgctgcccatttagtctcagacatcccatcatgggggcggtaactcgagtctgggctcccggaggacactgaagatggaggcctgctccgtagccctctcaggactgggtcattctgttcctcgccagtgggagagcagtggggcctggtcccgagcgtggccacagggcccagctgtccctgtgcttctgtcaagggcggcacattctgtccttcacgcaacagcaccatcccctcagctcatcccccatcatgcctgaaggaactatgtggtgcaggttcccacccccagcctggaagtgtggagccagacctgtctccttttacgtcagattccatctccctgcctccctttttcccctctcgtggcctgcatttctctmtccttcttggagtctctgtttttgtcttgctstttctcttctctctcctccttccttccctcctccccctgccattcctctgacccctttccttcatctccatttggtttcatcctccgtccttcccttctttcttgctctgcctctagcgcaggacagggtccatgtgatgtgagaacctccacgccaaggcttggttgggacagcccaggtctccccgcaggcaaggagactggaagggaygtgggcccagccacaccctataaagtggccatgcactaaggacctgtccagagtctcctctcrtattctgttccatgcttcttgcaaggactttccaacagagtgtcccaggacaggaggaacttaggccacccagcatggaggccagtggacagaggccagaccggcactgtgggggtgcttgggctggaggaccccaggtacttccggcttggagacatcctggaccatctccctgtgatgtttcatggggcctcagaatggagacctcacagtccctccacctgtccatctagaatatctacatgcaccaaaggcccgcaacactgccagccccgaaacattccttcctaccttaatcctcagacaccccgaggaaggaacgggtataggtgatttcccgtgcctgtgggctacagcccaggctctgagcttggcactcacagccttcatagtcttgctgactggcttgcccttgggcccaccctggccatgtgccctgttcacccccaactcttactgttgtgggacacttctcatgcctggggtgattgtgtaatgtatgatcacatctgggatgctttggcgggtggaaggagacactgaatagtcaattccatggcaacaagcacaggccaggactgtccgaggcaaaccagggcatatgggcaccccattcacccctcagtgtcttcctttcccttggcctgagctgttgaacccacccttcttgtctggcagcctctccctcccagcaagcccaaaattgtcagagcatctgtagctgctttgtgttcttagggccttctgtcagcgggtcctctccctgcaggctgcctgccctccctgtctccctaccctcctcagccctggcacacccagttggtgctcagtgaggcagggattcaaatctttgaaccgggagttgttctggggtgctacccccatgggtactttgaggcccaaaagccctccctctgtcctccctgggcaaggtcccttccaggccaggccctctccaggtcagagtccttcaccatcctgtctccctttctctccctctcccgcggtcagtggcggccagaggagtccgaggactatgtaagtaacaggtgtgcgaacgcggacaagacatgggtcaagctgggctcgtgggacgctcctcctctccctcctttcctgctagcctgcrctgccragatccacagggctctagccacatcaggagaaaattggcgtttagacacaagcactgagctgagcagcgattggcatttcctctaatccttacttcttgcctgtcgagcagcaatttgaggccartgttcatgatcgaccagggcctggcccctgccccggccagacagggatggagttaaatccaatcctgatcgttaggccttattgatccctggagtgaaaaatcacctgctttagggcccaggctgggagggctgtctggagagtcggattctggcattggtgcattctggagccccagccctgggagaccctccagctgtggcaggaggggtccatgagggggtggtggcagctgcaggggccccactcaaggccagagctggagggataccagggttgatgacrgctctgttcccactgcacggtggtccctgccctgcttcccactcttctctctgtgtggtgtggcttgacctcccatggtgtttctccgcatgtccagagatgatgcctttgctgcagatgggtatatgggcagggtctgccaagcggggaggacattgccctggctgctgtctcaggcatcactgagaacagatgtggaagccagttccccaggtgtggaggttttcttattctcctagcccctcccctgcctttctcaagaggtattgcagggtatagacattcacagagttagtggcctatatgggggcagcggagtcctgactgggtcctataggatggcaccttagcccatcctgccaccttgctctgtctgtgcatgcatgcactggtgtccacaggcagccttacgcctgcttatgcaggagctgtaggctgtgtgcgtgtggctgccaagagccacgcaaggtgctgggtgcgtgygaggctgtgccctgttgatatcctcagtctccgttcwcagcacagtggagtgagggaaacagtctggccctttgttcttgtctgaaaagaataatgagctgtctgccccaggcgtgcggctcctgggatgggcggggtcctcccaggcctgcatcctacctgcctgcttcctctccagcagaggccaccattgtatagccccaccttccacaacccctggccttgtgtgccccggggctcccctcaggctagggtcctgaggtccctgacaaggtctggcctctccctgcattcttgtgatgggaacgaacccctcctcctccctcaggaaaccactatcagcggcctgaccccggagaccacctactccgttactgttgctgcctataccaccaagggggatggtgcccgcagcaagcccaaaattgtcactacaacaggtgcaggtgagtgaggggtcaggacggacctgagggtggggcagcaggagggcagcgccagagcccagcccgtggtccttcagtcccaggccggcccaccatgatgatcagcaccacggccatgaacactgcgctgctccagtggcacccacccaaggaactgcctggcgagctgctgggctaccggctgcagtactgccgggccgacgaggcgcggcccaacaccatagatttcggcaaggatgaccagcacttcacagtcaccggcctgcacaaggggaccacctacatcttccggcttgctgccaagaaccgggctggcttgggtgaggagttcgagaaggagatcaggacccccgaggacctgcccagcggcttcccccaaaacctgcatgtgacaggactgaccacgtctaccacagaactggcctgggacccgccagtgctggcggagaggaacgggcgcatcatcagctacaccgtggtgttccgagacatcaacagccaacaggagctgcagaacatcacgacagacacccgctttacccttactggcctcaagccagacaccacttaygacatcaaggtccgcgcatggaccagcaaaggctctggcccactcagccccagcatccagtcccggaccatgccggtggagcaaggtgtgtgctgtggacatggcatcccttcccgagtgtggctgcatctgggggtctctgctctccttgagccactgacctctggcgactgtgatccaccagcctctggtgtgtgacctccaatctctcatgactgtgaccactaacctctagtgaatgggcaccacattcttgrtgcctgacctctgctgtccttaacctactgacctctgctgtatgaccttctgatctcttgtgaccttgacccactgatctcttttgactgtgtcactattcttgggtgtgcaacctcctgatctttggtgtgtgacactaatctcttggggccatgacccaccgacctctagtgaacatgctccaccacgctctggtgtgtggccacatgcttctcatgaccgaaacccactgaccctctgatcactctggcctggtgtccatcggctcaagcttttacactcgcgtttctggagattctgaccctggttgctgtggcatcccccgccctgtttggtgctcactgtggaagagcttgggctgggagttcaactgtgccgtttgaagctggctgggagtggggcgcttggtactctgcagccatccttcaaccccctgttccccaaccagtgtctcatcctggccattcaccttccacccttccagcccattcaccccacctcatatacccagcagagctgactctctctatgcctttgcagtgtttgccaagaacttccgggtggcggctgcaatgaagacgtctgtgctgctcagctgggaggttcccgactcctataagtcagctgtgccctttaaggtgagtaagggccacggccrgctgagcctggcacacacacaggcctgctgggtgctgtctttccagtcctaacccatgtgcatccggctgtggagcaggaatgtggttgtgtatccgtgcactgtgccttgcagcccgtggtagggaacctcacccaaaggcattgattgcccctcccgtcccccacagattctgtacaatgggcagagtgtggaggtggacgggcactcgatgcggaagctgatcgcagacctgcagcccaacacagagtactcgtttgtgctgatgaaccgtggcagcagcgcagggggcctgcagcacctggtgtccatccgcacagcccccgacctcctgcctcacaagccgctgcctgcctctgcctacatagaggacggccgcttcgatctctccatgccccatgtgcaagacccctcgcttgtcaggtgtgcacacgaggtatcgggggaggcggggcagggctggaggtaaccagcagtgacagtcctgattcctgccctgcccacccaggtggttctacattgttgtggtrcccattgaccgtgtgggcgggagcatgctgacgccaaggtggagcacacccgaggaactggagctggacgaggtacctggggaggggatggggacactgacagccccattgcagtggtcagctgtggccttcctgccctgagcactgtcccagtgactctcagattcactccccaaattgaaatctctcttctggctggcagcccgcccctctctggagagagggactctgaggaaaccatctgggagtattcacagaactcccggagggcttacgaagaatccctggggtgggatgtcgtggagatgcctctgcaggtctagagaatgccaagccctgtagacactgcagagcctcgcagatctagaagctatggagggcttagtgagccttatagccaggagtccctgaatgtttgaaatccttcagtcctttctcatagccagtgtggcaacagcctggttagggtgggkcagcttacacacagggctgcttctcatgggctgrtggggaggagtggcttcacggtgtctgttactctgtaggggcagtgggttgggcaggtgtgggctctkacacggaaggtgagccttgatctcggcccagggagctgacatcccaggccacagccycagggctggccggcatgctccaaggcccctcatgacccccatgctctgctctgccagcttctagaagccatcgagcaaggcggagaggagcagcggcggcggcggcggcaggcagaacgtctgaagccatatgtggctgctcaactggatgtgctcccggagacytttaccttgggggacaagaagaactaccggggcttctacaaccggccyctgtctccggacttgagctaccagtgctttgtgcttgcctccttgaaggaacccatggaccaggtctgcctgagccggcttggctgtcagcaccctgattccctgggcctggcctgagacgatgccagtctcaaacaccacaagaccccaggtctttatcagtttgggggcttcgagatcctggggcagcactaaagacccaagatctgtcccggggatcctaagacgcggccctgggacccagaggccagacctaatgtggctccagggacccagtcctgccaggtccaccttgtagggtctgggagaccaggcccagggtaacccagacccagagccctttctccaggattrataggcagagggtggggggttctcacgctgagctcacagcctgctgttctccaccgggccacagaagcgctatgcctccagcccctactcggatgagatcgtggtccaggtgacaccagcccagcagcaggaggagccggagatgctgtgggtgacgggtcccgtgctggcagtcatcctcatcatcctcattgtcatcgccatcctcttgttcaaaaggtgagcactgccctcagagctccgggaacggccacctgcccctcgcctttcaggccctctccgggtgtggtgcctgtggagagcgtgcagccttgcatcctggaccctgagcctcaggctcagcaggaaggcaggaagggcaggagcagtgtgtgtgcctacctgtgtctgcaggcctgcatctgtcaggtgagggagcctctgcagcagcctgggcgtgaggaactaaagcctcagagggttgtctcatgtgcatccctggcacgtctgtctgtctctgtgtttctgtggataagagtgcgtctgtctcctcttcagttttaagacaccgccatctcctgagctcctacctcgagtcctttccttctgccaccattcctggatgattccccagccctactctcctgcttaggcctagagaggtcgagctggaggcccacaggccatggatgctcactaacagacatgactgatggcctgctgtgcccgtgccatccgcagcggcctcagcctcagtgtgtctttcccactcagttctctatcggcagtggccaccacctgccctaggagtctcccttcctatccgtgcaccttccagcctgaaagggatttccaaagatttaactttgtcactctcagtttaaaaccttttgatggctgcccacgtaaagcccaccctctttagcctgacagccaaacacctggctaatctgacccctgccacactcctgacattgcgacactgaactcattcagtgttcaggcccacacagggtgtgccctctgcggatctccctccccctgcccacttggcaacagcaatctcatcgttcaggactcaagtccatgctctggtgcctgcaaggccttgcctggcccctaccccttccttgcacagctgtcccctgtgatgctccactgcaaacgcagctgggcctgtgtgccaagccttcagcccccagcactgggctgagcccacaggcatgtcagtgagcacctggcagatgaagatatgctagtctgtgtgtctgagcacatctctgcaccatgcaggagagcctgtatcctgtgtgcctaccctggacccactgttccttcctaaagagtccactccttcctcccagggtggatggacctgtgggcgggtccctaaggagtgtcccacagatgcactcatccttcccacttccacctgcattctgggtctgtccagagaggtagaccccctccctgtgaatgtcatgtgggtgccatataaggggcctgcagggtccccatgtcattagagggctgagtgcttggtggaaactgtgaccgttcctttcttctgtccttgcttgtctttcgggacctagtaaacaagaaaggtaggagttgttccttctctcttcacacacctccccctctacttctaatccttgggccagcagggagggatgacgctttgaccagaagtcccctggcctatggctttaagcagcaaactgtccagtcagctcagcaggctccctggttcaggactgagtcctcattggtgtgaggaggcagtttctgtctcactcttgccagttcaactctgcagaggatgcttcttctctggggcacatacataatacagactgcattgctttccctgagcgtacagagctcaccagaaccatcacccggctcccagttctctgagaagttgcctaagtgctgcgagagacagtctcgcacagagcaaagagcagtcactgtgtggaacagcagagaggcatgtccttgtacccacctgagcacactcactcaaattcttcttyccgaagcacatgcgtctgcagaccacaagtagcctctggctatttgttggcagctgaatcctatggtctgtctctgaccctgtccttgtagatgggaaaactgaggccagtgagagaggactctgcccagctagggtgacgcctttcccgtccctcccctgctgccctgggcatttaccctgatactctgagggccaaaaagctggggccctgtctcctgtgctgtttgtgtattttatgtgtcatttgcatgtttgttcccggtggttcctgctactcagctgggtggccttggagatagcagtcactgtcctgcagtgacctgccttctatccaaaggagctgctcgcccctgcaaccccttcctccctgctgcactgcccctctgctcacgccacactcctgctctccctaccccctccctgccctgtgttctctcatgtcaaggctgttctggccctggctcctccgcgctcagagatcctgggaagaggtggggcagtaggaggacagagccgtggacatgggggctccttggcagccagccatgccatgtgtcactgtctcagcckggacctcaggttctcaccagcctcccttctgtctctctaggaaaaggacccactctccgtcctctaaggatgagcagtcgatcggactgaaggactccttgctggcccactcctctgaccctgtggagatgcggaggctcaactaccagaccccaggtagggcactcctatggcctgtgtgcccccagcccagacctagcaggcctgtgggtcygttctgcaggtctcagggtcgccactgaagttcctgggccgcrtgcacttgttcctgctccttttcttcctttctgcccttctccctgtgctcatccactttggttggaatgactggggagcccccatatcctgcagctggacaggtgccccaggccaggaccctcttaggtggcaaagccacttagccactgccttgtcttcagtcaaggcctctgaatatgggctgaggacctcccagagcccacgtctctgccacagggtggccagtgtctggcscacgctctgacgcctccacatgaaagaggggcatgttagcagtgggagatgcctcaccagacatctgtggggagatgaagtgcctgcacctgagccttcctggaggccgaccccaggtttaccataccacgtacctgccccttctcctagccactctcatggggctgtccacctcttccttctacctgaaatgttactcctcccaacacccagcagacacagctcagacctctcctcttgcccacacccccacagggttaggtgtctcttcttggctccaggaacctccctccttcttccttttgacgcctctcacagtgagctgggattacctcagtgacagtctctgagctctgtggtgccaggaactgtgtcttgtcatcccccatcccttgtattcagcgcacgatgggttcttgttgaatgcctgtgaaatgaacacacagacaaatgaaggaatgagtgaactaatgcatacacacagggtttgtgtatgtatgagctggttattctrcatgtcaaattaccccaaaacttagtggcttaaaacaacaataattatgtattatctgtcacagtttttgtgaggcaggaattcagacaggggcacagcaggaacagcttgtctttattccagaaagtctgggccctcagccggaagacttgaaggctgggagctagagtcatttaaagcaggggttggcagactatggcccgtggccaagtacagcccaccacctgtttttgtaaataaatttttactggctgggcgtggtggctcatgcctgtgatcccagcactttgggaggctgagccgggtggatcacctgaggtcaggagttcgagaccagctaatgaaatcycatctctactaaaagtacaaaaattagccaggtgtgtggcccctgtcatcccagctactcaggaggctgaggcaggagaatcacttgaacccaggaggtaraggttgcgtgagccaagatcgtaccatcgcattccagcctgggtgacaagagcaaaaccccatctcaaaaataaacaaataaataaaattctactggaacagacacacccatttatttatatgctacctacctatggttgcttttgcactgtaaaggcacyattaaatagatgcagtagataccagatgtccacaaagcctaaactatttacgctctggcctgttatggataccaagtttgccaacccctggactctaaagcctctttcatccatgtgactggtggttgatgagccagctctgagccttgctgtggctgtcagctgggacacccaacatgaggcttcttcaggtggcctgggcttcctcacaacatggtgactgagtttcatgagcatgtgtctggagagtgtgccaggcagacctagcaggctgttgcaacccagcatgattagatctctgaagaatcaagcaccaggatgctgggacctggagtgcagagaagcctcttcggggatgggatgctgagccatgtggttattggtctggaaaagaaggatgggagagagctcctcagtggaagcatgtgcagaagcttgggcagattgcatgtgcgtcaaattatgagcacctgagggtttctgcagcatgagagttaggggcttggggaatactgagccaagagaagactggagggctaggcagaggtccagtcaaaaggaccttgaatgtcaggctaaggggcttagacttcctcttcaggatgccagggaggtaggtattaaaggttttcagcgggggagccaggtggtcagaaccatgctttagaaatgtcactctggctccttgaggagactggattagagaggagaaattgaggcagggagaccatttaaaaggccagcaaccaagtgaaaggtggcagtgggaacagaggggacagacttgggaaacgtgaaggaggtgaggacagcagagtccgggcttaagcccacttggggagaggtaagggtggctctgcagttgctggctgaatgagcagggggtaggggtgtcctggggctggtgggtctgtgggtctgaggacttctgagctgacatcagggctgaagccctgtgggaggggccaaggagcatgtggtagtcaaagcctgagaatagatgggctctcccagggtgagggccagaaggagaccgggaccaaaaagcccagggcagggaaggtggtgcagcattaaggaaagatggatggagagcagctagggagattgagaaggagcagccacagccagacgagagcaggagcgcagtgtccctgatgccagggttgggggagttgtgcaagggacgagaggacttaatgaggtagggcagtggggacacccagtgggaggaccgttggctttggcagatggggccttgaagagagggtggtggccacgtcctgtgggcagaagtgttgcagtgagcagcgtggcaagtgggggctgagaaagtggagaaacccctttcaaagatcctgggaagatacctgggaaggaggcaatgagcagggcacagtgggagagtagagggtgtgggatctgagaaggagggctcttttttccaaygtggaaatcatctgaaaatcgccaagggcaaattttggtatcaaaaggggcagggctggtttggacttaagtatttagtcatagagccccccaaggctgccgagccaccaggstttagaagtgctcgcctctgggggtgggacacccagtctgtattaactgggagacagaaggagccttgacggaacttgtccgcagccccagcccctcaccgccccctcctcttctccgccagcccctcgcaagcccgctcggcacctccactgtgtgtgatggtgcwgtaagcagaaaaagttaacgggctytcttttcttgccccgttgtttttttcgtttgtttgtttgtttttttctctgcaggttccagtgtccccagttgcccgaatacctcaagttagttttcaaagttcccgtgtttgggggatactttggcttctgtgtctgtttccactccttacttttgtttaccccatcgcctccatccttccttgaattcttctctccccttccctttcttctccccmartcccactgtctcctaacctttttccttccctaccctcccctctgcccaccttgcttcctccaggcctgttttctctcccaccggccccgtctctgttctgcctctctggcctccagtcccggcctgacacccttccttctgcgtgcctctacctctcatctcctctcctctgtctcacacccccctcctggtctctgcttctctctctattgtgtctgtacttcatgaccactccatctacacacttggtgcccgggatgacgatggctgtgartctcccatggtgactgccaccggtgaggggcaggagggctgtctgcaggcagatgcgatggagcccagctcctgtcacgtctgctgccaccgacctgggcgtcccacccctcctgggaggaaggaagcctctcttccatcttgagagacctgccaggcagggcctagtgcccccactcagcaccccgccaccaaaacaggctccacatgctcatggcacaacaccgccctctgtcctctcccaccctccgccatccctgtcgccgcatgtgctgctgtctccatgccaccagttccaagtgctccatggtcacacatgttcacatgtgcacatacatgcgttggggctttctctgccacactgctcaagcctcacactaatgctgcctgtgtatgccctacytcccctaggtatgcgagaccacccacccatccccatcaccgacctggcggacaacatcgagcgcctcaaagccaacgatggcctcaagttctcccaggagtatgaggtgagatgttcccgccccctaccaygtgcctggcccaggcctacccaaaccagctcctgtcctgtcctaggtcccagctgtggtgggtgaggaagcaggggtccagctttttcaggagcacagagaggagggttggcagtggtaagggtcagctgggaaccgggtgcctcagatgctgggtctggccatagcctggcccagcaccttcttggggtcacccttaggagatggtttcaaaaggctgtgagtgacaccagggtctggacactcagacacgtgctcaagtgctcacaggcagacacaaggccacaggcatacagacatagatcagtgataacagccacagtagctggcatctatcaagagcatcctgcaggccagcaccggtctgggcacttggcatgcattatctcttttggttcccccacagtcttcagaaatggggactgttattatcccatcttccaggtgaggaagcgggggctcagagaggggaagtgacttgcccaagtcaaacagctgatgagtagtggagccaggattcaaacccaggcctgcctgctgccctgtgctctgcacatgcatgtgctcacgtgtgtactccgatgccacagctcacggggagtcggggcctcgagactggctgctcaggctgtacaagtcccgcttggagccctccacacgttcatcttgttctggacttaactcctaggagcctgctgggggctgagccttcargagtctgagggtttcccacccacagatggtgtcggggtgactctgagcatccccaggctgcccatctaggaaggggatttgttagagaaggaggtgatttaaagacaagactcctggccaggcgcagtcgctcacgcctgtaatcccagcactttgggaggccgaggcgggtggatcacctgaggtcgagagtttgagaccagcctggccaccgtggcgaaactgcatctctactataaatacaaaaattagccagctgtggtggcacatgcctgtagtcccagctayttgtgagggctgaggcaggagaatcgtttgaacccgggaggcggaggttgcgttgagccaaggtcatgccattgcgctccagcctgggtgacagagtgagactccctctcaaaaaatataaaataaaaaaaactcttaaaaaagagtatttttacttaaaaaagagagagagagacctcctcctcttccacctcctccaagcagcagcctgtgcttgtcgttctgccttgtccacagctgtttcctcagcacctggcactggcctcagtagatggttggtggacaggcaattgaggggttggctgagcctaacctgtgagtttgcgccccttctgatgtccaccctcagctgtgtttgggggatgcatcctagggctcaaagattgcctttcccaagggctgtgggccaggtttctgaagagaaagctgggcttggcaggcaaatggatgagtatgtctgcggcacagcaaccgtgctgcctctgcctatagggcccccctggggccctgctccacacaaggctgggctttgggtcacggagcccgtaaggtgggctccctgcctcccatggcctccacccacactcatctgtaccatgtcctacacctgcccttccttccagcgcagccctgcttccccatctgggctcgtggggcctctgttcacagtagtccccttccatcttctacctgcttccctcctctgatcagagctttccttacaagaccctcctcctccaggaagccttctcaggctccccaaggctgccgtgggctctccctcagccaggaccccatagctctgttgtcttttttttttttttttttttttttttttttcttttttggaagtctcgctccgtcatccaggctggagtgcagtggcgtgatctcggctcagtgcaagctctgcctcctgggttcacgccattctcctgcctcagcctcccgagtagctgggactacaggtgcccgcyaccacacccggctaattttttttatttttagtagagatggggtttcaccgtgttagccaggatggtctcgatctcctgacctcgtgatccgcccaccttggcctcccaagtgctgggattacaggcgtgagccactgcaccaggcctgctctgttgtctttaacgttcagtcagtcattgatcacacattttccatgtgccagtccccgtgctggggatgtggagacacatgccctcagggaacccagtcgtggggagcatgtgcagacagataatcagcattgaatatgtgactctgacagcatgccctggtgttgaatagkaccgacaggcgtgcaaaaggtgggctgacagcaccagagcagcctgaggkgtggggtgtgctgcggggtctcacggaagcagtgacgcggtcctgtggagagtaatgaggctggggacaacatatggaggacattgcgtgctatgctgagaacttcagatmgtatccatctggaaaatgtgaagataataatggaacctrtctcgtatgagaatttgaggagggaatacatgcaaagtgctcacagcggtgccaggcacactgtgggtcctcactaacgcttcgctattatcattattgctctccgaggtgaagaagagccacagaaggcctttaagcaggaaattgatattcacatctgcattttggaaggattattctggctgtggggctgagtgggtcagagtgggacaagaggaaagaggcaggaagaggctgagcctcaattggggtggcctggcccagggcagtggcagcaggttggagagagctgagggggtggggragcaccagaacctggtgactggcagggcggggttggtggaggccggaggaattttgagcttgacttctaggttctggcctggcactgaggggtgagggtkcctttcgctaaggtgtagtcccagcagcagcgccaggyttggaggggaagctgatgaactcagctttgaaaggactgcggttgaaggacctcccggtggaggtgtcagagaggctgctgggtactcggggaagagctctgtgctgctgctgaggttatgggcagctccagcatgtggtgtaagaatcaggtgagcaaatgaggtcacccaggaaaggttgtagagagagaagagggcctagaaggaaccctggaggagctctgcgtcctgcccacgggaagggcaggggagagagaggaaacagagaaggagcagctgaaaggaagagagccgagcagggagggatcctggactacctgagaggggccaccatcccttccatctgtcctggctcatttcattaggtgaatgcagggcttcgggagggactctgggtgttcagagccctcagcagtttcgggactgcctgagagggggccaccacctgtcctagctcatttcattaggtgagtgcagggcttcgagagacccttcacctgccccatcccagctcagaccactctaccaggcaaggggatttggtaccatggtcagaggagtccccagtccatcacttttctgataggtgatgtggcaacctgtgagctccatggctggcaccacgagatagagggcctggctgtggcctgtggagtgaargcaggatgtgagcatcaccgggaaggctgggtcccctgcaggagaagcaggtcaaccttggctcttaccccaccccacccgctttctccattctytgcagtccatcgaccctggacagcagttcacgtgggagaattcaaacctggaggtgaacaagcccaagaaccgctatgcgaatgtcatcgcctacgaccactctcgagtcatccttacctctatcgatggtgagccaagggggtgccyctcccatccccttgctctcccccttgctagctagggcaacatgtcattctacagaggatgtccacgagtctcrggggtgcactgaggcatggtgggctgggctggggaccctgtagtaatgccctcccacctcctttcttatccataggcgtccccgggagtgactacatcaatgccaactacatcgatggctaccgcaagcagaatgcctacatcgccacgcagggccccctgcccgagaccatgggygatttctggagratggtgtgggaacagcgcacggccactgtggtcatgatgacacggctggaggagaagtcccgggtgaggctgcagggccctgccaggaggcgggtgggaaatgcccagccacaaggtgatacagggcaccttcttctgtgccgctttcttctgtggaggaagtcgctcaagtgatccccagatgctattgttactgggggtattatgctccccaaatactgggtgtttctgggatacagcatgttccccacatgctagtgggttccttaagatgttaatatgtttcaccaaatgctgtcattttcggagaatgttaatgtgttccccagttgctggcgtgttcccggggtattcrtgtgttccccagatgctggagtgttcctggggcattaacacatctcctaagttaattagtggaaagagctgctgttatctgtttttggactgcaaagcattgactggaacgtaaaatttacagagcttgaaaatggcacataaacgttatgggtaaatttggcagaaaatgtgcctggtgcgatctggcgttgaataaataattttcaattatgacccttattccactagctagggcagggcggtgacatagcttgaggacctgatgtggcttgtggaggacagggggcaatggatctgagagctcagggctggggggctttgtagccagaaaggctacagccagggagttgaccagcctccaccctgcttctgcccgtctgagcctgtgggcttccttcagcctgccctgctcatcctcctgcaggtaaaatgtgatcagtactggccagcccgtggcaccgagacctgtggccttattcaggtgaccctgttggacacagtggagctggccacatacactgtgcgcaccttcgcactccacaaggtatagcctttycccagtgcatatctcttacccagacactgtaaggacagtggcctgggtgtggtgtgctgggtcggggggaagctggagcctgggtgttggagggtcggaggctcaggtgtgtgagtgatgtgatgatccatgttatgggaacagtgctaggagcttcaggctactctgtgtggcttctgagtcccatkgggaagtggcgggtatggcctcagcatcaggtcattcagtcctgagtctatggcaggtaggctcctagtcgccagtatgtccccactttgtcccccagagtggctccagtgagaagcgygagctgcgtcagtttcagttcatggcctggccagaccatggagttcctgagtacccaactcccatcctggccttcctacgacgggtcaaggcctgcaaccccctagacgcagggcccatggtggtgcactgcaggtgagagggtacagtgccacccagaggggtgggtggggtgggaggtgggggcgcctgtgcctcaagctgagcccgtgtcctgcagcgcgggcgtgggccgcaccggctgcttcatcgtgattgatgccatgttggagcggatgaagcacgagaagacggtggacatctatggccacgtgacctgcatgcgatcacagaggaactacatggtgcagacggaggaccagtacgtgttcatccatgaggcgctgctggaggctgccacgtgcggccacacagaggtgcctgcccgcaacctgtatgcccacatccagaagctgggccaagtgcctccaggggagagtgtgaccgccatggagctcgagttcaaggtggggctcgggtgggcctgcttggctccagggcctagactgggtcatgcagatgacccccacccccacaggaagcctggcctgaccaatccctgcctctcaatagttgctggccagctccaaggcccacacgtcccgcttcatcagcgcyaacctgccctgcaacaagttcaagaaccggctggtgaacatcatgccctacgaattgacccgtgtgtgtctgcagcccatccgtggtgtggagggctctgactacatcaatgccagcttcctggatggttataggtcagcatgcatgtcactgccccaccatgccctacaggggcctaggcctgtgcctggctggtgggggtgggcagcagagtagggccagcctagaagaccagagagggctgggtagagcagtgaggacytcctggaggaggggtgatctgagcagggccccaaggggctaggcagcctaaggggagactctaggggcagcagcacctccagcatgtccagtcttatgtccaccccagacagcagaaggcctacatagctacacaggggcctctggcagagagcaccgaggacttctggcgcatgctatgggagcacaattccaccatcatcgtcatgctgaccaagcttcgggagatgggcagggtgagcccaccctttcccccagggcccctgtcatacctgggagaacaccagccacccttgggggagctgccgcctatgttactgtctcctttgacaccccagctgcttgtcagcatggcctcaggcgcccgttattactacctgaggcatctgtcccagaatcctgtgaagcctggcacccctccccyattccttctcacctgattatgggggcccgaccctctgtccacaggagaaatgccaccagtactggccagcagagcgctctgctcgctaccagtactttgttgttgacccgatggctgagtacaacatgccccagtatatcctgcgtgagttcaaggtcacggatgcccgggtgagtgagtgcattgagtgtgtccataacgctgcctgtccacacrctgggtggatggctgcctgcatggtaccttagctcaagcttcagaaatctgaggcggtgggtgggtattagggtgtgagcacatctccccctgtggcctcgggtgcagtgacacagatgcatgcctgtatcatggtactaccctggtctagtccagaggggtggctgcctaaggcacgaattctaatcatgtaccccacccacctttcccaggatgggcagtcaaggacaatccggcagttccagttcacagactggccagagcagggcgtgcccaagacaggcgagggattcattgacttcatcgggcaggtgcataagaccaaggagcagtttggacaggatgggcctatcacggtgcactgcaggtgggactggccccctggagggctggggtgggtgggcctgaaggcctggcagacccactgcatgaggcaagcaggactcctgacccaactgtgtttctgagcagtgctggcgtgggccgcaccggggtgttcatcactctgagcatcgtcctggagcgcatgcgctaygagggcgtggtcgacatgtttcagaccgtgaagaccctgcgtacacagcgtcctgccatggtgcagacagaggtaacgcagaccaggctgcagggccagggccttggcagcagcgctgctgggaaccctaggctttagcaacagtttgatgcccacaggcatgtgcattyattcatgctgccaacctttcacgtggcctgcgataggcatggtggtgtgtgcttatggtcctacctacttgggaggttgatgtgggagaatcacttgaggtcagaagttcgaggctgcagtgagctatgattataccacggcactccagcctgggtggcagagcaagaccctgttgctgaaaacaaaacaaaacaaaacaaaaatgctgcaacattgcctgtgctgcctgggggctcaggggattgatgagtaagatgtgttctttcattcggcagctctctgctgagccccagtggtgtgcctggctctgggcaaggttgcacagagcaatccttatggggtgcccastcaggagcagagaaacatgaytgggatggcagatggaaggcaggtagatgtgggggcctgagagaatgacaggagagagatgagccttcagaggctctttcaggctcccccgcacactgcctgatgtagctgccagggtccagcayctgctcttggccagcagaggctaactccatggctgcagtgtgagtgtcagctgtgtagtgggggtgtccactggcgcgacccacactgaccagccccctatcctggcaggaccagtatcagctgtgctaccgtgcggccctggagtacctcggcagctttgaccactatgcaacgtaactaccgctcccctctcctccgccacccccgccgtggggctccggaggggacccagctcctctgagccataccgaccatcgtccagccctcctacgcagatgctgtcactggcagagcacagcccacggggatcacagcgtttcaggaacgttgccacaccaatcagagagcctagaacatccctgggcaagtggatggcccagcaggcaggcactgtggcccttctgtccaccagacccacctggagcccgcttcaagctctctgttgcgctcccgcatttctcatgcttcttctcatggggtggggttggggcaaagcctcctttttaatacattaagtggggtagactgagggattttagcctcttccctctgatttttcctttcgcgaatccgtatctgcagaatgggccactgtaggggttggggtttattttgttttgtttttttttttcttgagttcactttggatccttattttgtatgacttctgctgaaggacagaacattgccttcctcgtgcagagctggggctgccagcctgagcggaggctcggccgtgggccgggaggcagtgctgatccggctgctcctccagcccttcagacgagatcctgtttcagctaaatgcagggaaactcaatgtttttttaagttttgttttccctttaaagcctttttttaggccacattgacagtggtgggcggggagaagatagggaacactcatccctggtcgtctatcccagtgtgtgtttaacattcacagcccagaaccacagatgtgtctgggagagcctggcaaggcattcctcatcaccatcgtgtttgcaaaggttaaaacaaaaacaaaaaaccacaaaaataaaaaacaaaaaaaacaaaaaacccragaaaaaaaaaaagagtcagcccttggcttctgcttcaaaccctcaagaggggaagcaactccgtgtgcctggggttcccgagggagctgctggctgacctgggcccacagagcctggctttggtccccagcattgcagtatggtgtggtgtttgtaggctgtggggtctggctgtgtggccaaggtgaatagcacaggttagggtgtgtgccacaccccatgcacctcagggccaagcgggggcgtggctggcctttcaggtccaggccagtgggcctggtagcacatgtctgtcctcagagcaggggccagatgattttcctccctggtttgcagctgttttcaaagcccccgataatcgctcttttccactccaagatgccctcataaaccaatgtggcaagactactggacttctatcaatggtactctaatcagtccttattatcccagcttgctgaggggcagggagagcgcctcttcctctgggcagcgctatctagataggtaagtgggggcggggaagggtgcatagctgttttagctgagggacgtggtgccgacgtccccaaacctagctaggctaagtcaagatcaacattccagggttggtaatgttggatgatgaaacattcatttttaccttgtggatgctagtgctgtagagttcmctgttgtacacagtctgttttctatttgttaagaaaaactacagcatcattgcataattcttgatggtaataaatttgaataatcagatttcttacaaaccaggactctgtctcagctgtttctggaaccaaagagtctgggccaaatcagtagctaggatgggttctggagattccctgctcctgaggagacggggagggtaccctaagtatttgtgccagtgtaggctcctggcatggctacccactttcagaaaggagtggttataaaccctgaaaaccaggccaccaagagccagccaggccagagccaccagtgcatgtgaagagcaccctaggccggggagcataccctttgcctctctttccctttaagattctgtgggttgcactatcggggcattgggactgcccctctcccactaccttggaggagagggatggccctgtggcagtagagactgaatgtatggaaattggttagtgagatctcctgtaattattgcaatgtggataatggacacaaaaaacagtgtgtccatctggcccctggacacacagctgcatcacccactgagctgtgcagctgctccactggtgagcagacaagtcctaccaggttgtcaaattgtggaacttctagggatacagatgaaggagacccagaacaagctgcgaagagaaatgcgtaagtcagcaacgaccacaccaaggcagcatctgacccagggaaggcttcctggaggaggtggcattcagagtgtttcgtagaatgagtagcagttagtttttttttgtttatttttgagatggagtcccactctgtcgcaaggctggagtgcagtggcgtgatctcggctcactgcaacctctgccccccgggttcaagcaattcttctgcctttaccctcctgagtagctggaactacaggtgcccgacaccacgcccaggtaatttttgtatttttagtagagacggggtttcaccatgttggccaggctggtcttgaactcctgatctcaggtgatccacccacctcagtctcccaaagtgctggaattacaagcatgagccgccatgcccagccaaagtagcagttagtttttaaaggtagggaaaggttttccaatggaacatgtacaaaggcttggaagcttgtcacagaccaacttcgtgagaaactccaggaggtgcattaagattggagtagagaggcgtggctaggaaggtgggccggatggagtcagatcttgcagctaaggggattgaggtgattgtcagagggatgcagggatccctggcaggtgcagtgcttctgttcttaacaccctgggccacctccattgagtccttcaccgcgttctagtattggcagccatctccttgggggctgtgagtgactgaggcctggcaccaagtctcttctgggtatcccyagcacctaggtcggtgcctggcatatttctattcagaaaaaaggcaccatcattacatgactgttgatgttagaaaatttgattaacttttgctaaataaaagaacaagccattaaacattttcaagtaaggggtaagtaccaggtgttcacttgaggaagaccggtagtcaggactgccccaggcaggctctgcgctgagggcgtgatgggcctgctcaccagtccttgcgagcagccggcagaaggatcctcctctccgcactcagatgaggaaacaggcttatgtggaatcactcatcagagaccacagggcaggtaagcgccagagctgggacccacatctgctgatgtctgctccagagtccctgcccttttcattgccagtgtcagccttctctctcctctacttccctccctcctcactcccccctgcaagcctgctcctcctccagggcccccattgcagtgcttggcaccccacctacctggtattccaggcaggcatcgcttgcatgctcacccccacctccattcatcgtcacaccctgcctgcttggcctccacgcctgttgtctgcatctccacggctgtctcccaagccgctttccctctcgcctgcactgccgctgtgcttcctaccaggcagtctgccccagcactgcctgggccaaaccgttctcagcacagtgggagtgattctgcctcgcagggcagacatgaccaagtcactgtcctgaggagaccctgccaggtcctcactgtccccatggttttccaggctctgcaggacctggcctgtgtggccttatcttccttctcccctcttgccccctgccctccagccaccacagaatcaattctttaagtttcttgcctgtttttttttgttttttgtttttgagacagagtttcactctgtcacccagtctggagtgcagtagtggcgatctcagctcattgcaacctctgcctcctgggttcaagcaattctgcctcagtctcccaagtagctgggattacaggcatgggccaccacacccggctaatttttgtatttttagtagagatggggtttcaccatgttggccaggcaggtcttgaaatcctgacctcgggtgatcctcccgcctcagcctcccaaagtgctgggattacaggcatgagccactgcgcccggccctgcctcaccattctatctcagctccagatcttcctacaagctgttcttctggaacattctcccccacttccacctggctaacccctcattgtttagccctcccctgaaaatatttccttcagaagccatccttaactatcctaaatgaggctagatgactgctatgcaagttatttggaatatagtatttcacttaattctcacaacaatgtatgaagcccattgtgttgataagaaaatttgacctaatccactccttcaacaaatatttaatgagcatttgctgtgtgatagtcattatcctaggtgcttggaatacatcagtgaatggaacagactttacctttgtggcattcatacattataaataaatgtatttatagtttgttaaaaggttgtaagcctaattagtggggagtacaataagaaggaccaaggccgggcacggtggctcacgcctgtaatcccaatactgtgggaggccaaggtgggtggatcacctgaggccaggagttcgagaccagcctggacaacagggtgaaacctcatctctactaaaaaatacaaaaactagctgagcatggtggtgcacgcctgtaatcccaactacttaggaggcagaggctgcagtgagctgaaatcacgccactgcactccagcctgggcaacagagcaagactgtctcaaaaaaaaaaaaaggactgggcgtgtgagggaagatttgattatttgatttagggtggtcaggggacacattgaaaagatgggacttgaggaaagacttgaatctggtgagttttgcctgagtatcttcgagatgagcatccaggtggagggagcagctatagcaaaggccctgggtgggagtgtgcctgatatatgagggtgggtgtggctgtgacaccctgagcaaggggcaagagggtagcaggggatgaggttagagaggaaatggggccagctcctttaccattgagaagactgcagaaatccagtggtggagagaagtggccagattctggttatatcttaaggcagatctgatagaatttgctgatggactcgatgagaaagagaggagtcaaggttgaccccacagttctggcctgagcagcaggaaggataaagttaccatttgttgagatgaggaaggttgtacagaagggttaagtaatctactcgagggtcccaactggaatttggtggcgttggtaggactcccagctctgcttaactccagggctcttttcacaccgctacctgcctaaagctagaaatcgtcagatgcattgagaaaaaaatatttggggccgggcgcagtggctcacgcctgtaatcccagcactttgggaggtggaggcaggcagatcacgaggtcaagagattgagaccatcttgggcaacgtggtgaaaccccgtctctactaaaaatacaaaaattagctgggcatggtggcacgcacctgtattcccagctactcggaatgctgagttaggagaatcgcttgaacccagaaggcagaggttgcagtgagccgacatcacaccactgcactccagcctgggcgacagagcaagactccgtctcagaaaaaaaagaaaaatatatttggaaggaaatataccagaaggttatgaggataggtgacttgttctttgtaattctccaaattttctatgaagactttatttatttatttatttatttattctttttttttttttttttttgagacggagtctcgttctgtctcctaggctggagtgcagtggcacaaatctctgctcactgcaacctccatctcctgggttcaagcgattctcagcctcatgtagctgggattacaggtacctgctaccatgcctggctaatttttgtatttttagtagagatggggttttgccatgttggtcaggctggtctcgaactcctgacctcaggtgatccgcccgcctcaacatcccacagtgctaagattacaggcatgagccaccacacccgacctgaagacttcatatttttttattttattatttatttattgatttatttattttatttatttatttatttagagacagtctctgttggccaggctggagtgcagtggcatgatctcggctcactgcaacctccatctcccaggctcaagcaattctcctgcctcagcctcccaagtggctgggattacaggtgcacgccactacctccagctaattttttgtatttttagtagaaacggggtttcaccacgttggccaggctggtctcgaactcctgacctcaggtaatccgcccgcctcggccttcctaagtgctgagattacaggcatgagccactgcgcccagccaatactttcattttaaaaaacaaaaattttttttttatttattaaagcaacaacagaaaccttttgactgggatccaggtgtgcaactttgaagtcctcattctctttcctcctgccaactccctagaggagagtcactgttaacagtttagtctatatcctcctgggcattttctatgaatatacaaacatgtataagaaacttcgtattttatgtaactagaatgatattattcatatcttgctgcaagttgcccatttcatttaaatatatgctttccatgtcaggagcttttttttttttttttgagacggagtctcactctgttgcccaggctagagtgcagtggcgcgatctcagctcactacaagctccgccttctgggttccgcgattctcctgcctcagcctcccaagtagctgggactacaggcgcctgccaccacgcccagctaatgttttgtattttagtagagaccgggtttcaccgtgttagccaggatggacgatctcctgacctcgtgatccgcctgcctgggcctcccaaagtgctgggattacaggcgtgagccactgcgcccagccaggagctcatttttttaactgctatatactattctgttatggatgtcccataattttaaaaatggttatcaatatagcttttttattaaataagtggatgcatatgataaaacaaataaaaatgattcagaggccgggtacagtggctcacgcctctaatctcaacactttgggaggcccaggcgggcagatcacctgaggtcgggagtaggagaccagcctgaccaacatggagaaaccctgtctctactaaaaccacaaaattatccaggcgtggtggtgcaggcctgtaatcccagctacttgggaagctgtagcaagagaattgcttgaacccagaaggcggatgttgcggtgagccaagatcgcgccattgcactccagcctgggcaagaagagcgaaactcagtctcaaaaaaaaaaaaaaaaaaaagtttcagggccaggcacggtggcttacacctgtaatcccggcactttgggaggccgaggcgagtggatcacgaggtcaggagatcaagaccatcctggctaacacg

SEQ ID NO: 95267 - DNA, 22682 bp, Homo sapiens
acatacaattgtccaacaagtgtatgaaaatgtgcttaacacggtaatcatgagggaaatacaaatcaaaatcacagtgagatatcatctctgtgaaataataagaataatatatatttggtctctgcccctggttcctggcacagatttcctaaagccctgagaatttcctgagtgataagagcatctgacacagagctttcgaatagcttggaatttctggatgacaggagtttgttttgttctaatgagatgactcctggtaggctctaggagaggtgccagtccccagaaagaccaagtcatgactagaagcttggaattttcagccccactccccattctcccgagagacgagaggggctgggaatagagtaaataattaatcgtgcctacatgatcaagtctccataaaaatccctgaagtatggagttcaaagagcttctgagttggtaaatatatctgtgtagcaggagggtggcacaccccaactccaggggacagaagcttctgtgctcagacccctcccgttcttaccctctgtactttcatcgagctgttcatacgtaactttttttttttttgagacagaatctcgctctgtcacccaggctggagtgcagtggtgcgatctcagctactgcaacctctgcctcctgagttcaagcgattctcatgcttcagcatcctgagtagctgggactataggtgtgagccaccatgcccaactaatttttgtgtttttttagtagagatggaagtttcatcatgctggccagactggtctcaaactcctggcccgaagtgatctgcccaccttggccttccggagtgctgggattacaggcatgcaccaccacacctggcttgtatgctttattatatcctttattagcataataaactgctaaaagttaagtaagtgtttccccgagtttgctaagccagcttagcaaattaatggaacccaaggcatgggttgtaggaacccctaagccagttgatcagaagtacaggtcacaacctgaaatttgagattggcatctgaagtggggtccatcttgtgggactgacccacaatctgtgaggtctgatgctatctccaggtagataatgccagaattgaattaaattatagaacacccagttgatgtccactggaaaactgcttggtgtatgggaaaagaccggcacacatctggtgtcagaagggctgtgttgagtggtatgtgaaggtggaagaaaaaatagtcagttcttcctattatatgctttctttttctttttttttttttttaagacggagtctcactctgtctcccaggctggagtgcagtggcacgatctctgctcactgcaacctccacctcccgggttcaagcaattctcctgcctcagcctcccgagtagctgggattacagttgcctgccaccacaactggcttatttttgtatttttttttttcagtagagacggggtttcaccatgttggccaggctgatctcgaactcctgacctcaggtgatctgcctgcctcggccttccaaagtgctgggattacagatgtgagccaccacacctggcccctattattgggtttgcattttacatttttattttttcctatctcttaacctcacacctgttagaatggctattaccataaagacaaaagaaaacaagcgttggtgagaatgtggagcgaaaggaacctttgtacactgttggtgggaatgtaaattggcacagccgttatagggaacagtatggaggtttctccaaaaaaaaaaaactaaaactagaactactatatgatcctcaaaaattttaatacagaactaccatattgagcaatcctgcttctgggtaaatacccaaagaaaacaaaatcagtgccttgaagagataactccatgtccactgctgcgctattcacaatagccaagatatggagacaacctacgtgtctgtcgacagatgaatggatcaagaaaatgtggcacgtatatatatatcagaataagaatatcattctgccttaagaaaggagatcttgccatttgcaacaacattgataaatctggaggacattatgcttggtgaaataagccagacacagaaagaaaaatactgcataatctcacttatatgtggaatcttaaaaagttgaacacatagaagcagaaagtaaaatggtgagccagccacagtggctcacgcctgtaatctcagcactttgggaggccgaggtgggtggatcacttgaggccaggagttcgagaccagcctggccaacatggtgaaacccccgtctctactaaaaatacaaaaatcagctgggcgtggtggtgcatgcttggaattccagctaattgggaggctgaggcaggagaatcctttgaacccaggaggcggaggttgcagtgagccgagatcacaccattgcactccagcctgggcaacagagtgagactccgtctcaaaaaaaaaaaaaaataaaataagaaagaaagaaagtaaaatggtggttagcaggcatggggaggtagggaaaatgggaagatgttgctcaaatggtacaaagttgcagttatacaggattaataagtctagagctctattgtacagcatgatgactacagttaaaaaagattgtattgggccaggcacagtggctcacacctgtaatcacagcactttggctgagatgggagcattgtttgagcccaggagttcaagacctaactgagcaacatagtgagatcctgcctgtacaaaaaaacaaacaaaaaaattagcccagtgtggtagtgtgcagctgtggtcccagctactcgggaggctgaggtgggaggattgtttgagcccgggaggtcaacgctgcagtgagccaagatcatgccactgcacaccagcctaggcaacagagtgagactcttgtctcgaaaaaaaaaaaaaattgtatactggaaattttctaagacagtagatttcagatgcggtcaccacacacacatatccatacaaggttactatgtgaggagatggataagttaattagcttgactgtagtaatcatttcattacagataacaaaacaccatgttatgcaccttaaatatgtgccgtttttatttaaaacaataaaacaacccaattgtgtgtacctgtgtgttattctcttgacaaatgggtgaaaatatgataaaagcccaactcgcatctgaggatacaacttaaagggattagatttcaaatgcctgcaccttccagttgacgctgcagatgaattaggagtctccattctgctccttgaccaactgtcctataaaactgagagtgccaaaggcaactaccgtctactatcttgctggtgccctgaggaattttttcagcaataataatttagacaaggccaggtgcagtggctcacgcctgtaatcccagcactttggaaggctgatatgggcagatcacttgaccccaggagttcgacaccagcctggtcaacatggaaaggcctcgtctctaaagaaaaatacaaaaatgagctgggtgtggtggcacattcctgtagtctcagctcctcgggaggctgaggcaggagtgtcacttgagcccaggaggtcaaggcctgcagtgagccatgttcatgtcactgtagtgcagcctgggtgacagagagagaccctcctcaaaataataattattattattacataattattagaaataattataattattattttgaatctcatggctaattaaaaaataatttaaacagattattttacttgtctttagtttacttaggagtgtattttaagtgataagtgctaaagagaaaaataatttaggggatggaggcaagggagtgtcagaatggtgagattttgttgacattttagatatggtgactaggacaaatctcaaataccggacagtatttgaataaggacataaaatatatgatggtgtaagccacaaccatacacaaaaaataacatttcagcagagggacctcaagggcagaggaaggagtgtgcgctctttgcgtgagcaagggagagagtggaaggagatgcagccagaggggtgaagcagagcagacggtagaggggcttgtgggccatctcaggctgctggcctatactgagagaatgggaagccatggagggttatgacaggggagtgacatgaccttaaatattccagaaggaatactctagttgccatgtggagaacagactgtaatcgaagaagggggaggcaggaaggccagttgggaagcaaaatgcaataatccaggttgcttggacctggaggtagtgagaagtggtcagtttgtggctatattctggaagcagagataacaggatttgctaatggagtgtgcatggaatttaaaagaaagagaggagctgagagacactctgcccaggttttgccaagcaattggaagaatactgctgtttattgagatgggaaagacggcaagaagagtaggtaaggcagagaacaggggttctgttttagacaggctggaggtgctcagacatccaaatggagattctgagagggaagctggatacacttgtcttgagtttcaagaagtggtctgatagatttgcctgtgtccccacccaaatctcatcttgaattgtagttcccacaattcccacatgtcatgggagggacccagtgggaggtagttgaacaatgggggtgggtctttcccatgctgttctcatgatagtgaataagtctcacaagatctgatggttttataaagggatttccccctgcrtgagctctctcttgcctaccaccatgtaagatgtcccttgctcttctgccatgattgtgaggcctccccagccatgtggaactgtgagtcaactaaacctctttcctttataaattacccagtctcaggcatgtctttattagcagtgtgagaacagacgaatacatggtccaagctagggctattgatttgaaaatcatcaaggtatagatggtatcaaaggcttgaggcaggaagagagaagagaccctagctgcattgcttagcattgcatccctagcacctggcatagtttccattaacagtaggcatgaagtatctactcagtgaataaatagaatgcatatgggctacagtaggagagagaaataaaatctttaatagaccaagttctatgagagcacaaaattaaagtcttttatttgaagatcttagcctgttttccaaattcagtgcagccagttagacactgattctgtctggtgaaacaagcatttttgtattttgggggactgctgctgcttctgactccaaattaaggattttttttttttctaaaaaagatggctcatgcaaaaatcactctttggtgtaaatatctagtcttcaagcaattcttgtaatgcaatcagaaagaaaaaaatccatggtttgggaggcaaaatttttgtgttctaaattctatataactgagttcatttgcttaactgcaaagcaggagctgctagtgcctgtctgtactgaggttcagagagactgtgggaatatgggggaattagaggctatctgaggctcttcaacacaataacccaagaagctatttaaatgctctttaaggtatttacataaatattactattctcattgtgcttttattttgtgttatcatgattataattgaagtgtctactgttactgcctcctgatctttgctagctatggagcatggactgggcttttagagcagcagccccaaaggaacctaaacattaaagcagagctgccctcaatggtttaacctgtgtgactctgcctatgacagccccacccacccatcttcactggatccaaatcaggagcaaggccgttggggtacctggtgggggtgatgctgtcaggggaggagcccaaaagggcaagctcaaatttgaatgtgaagggccaatgcactgtcagactragacagagaaccatcattaattgaagtgagatttttctggcctgagacttgcagggaggcaagaagacactctggacaccactatggacaggtaaagaggcagtcttctcgtgggtgattgcactggccttcctctcagagcaaatctgagtaatgagactggtagctatccctttctctcatgtaactgtctgactgataagatcagcttgatcaataygcatatatattttttgatctgtctccttttcttctattcagatcttatacgctgtcagcccaattctttctgtttcagacttctcttgatttccctctttttcatgtggcaaaagaagtagtgcgtacaatgtactgattcgtcctgagatttgtaccatggttgaaactaatttatggtaataatattaacatagcaaatctttagagactcaaatcatgaaaaggtaatagcagtactgtactaaaaacggtagtgctaattttcgtaataattttgtaaatattcaacagtaaaacaacttgaagacacactttcctagggaggcgttactgaaataatttagctatagtaagaaaatttgtaattttagaaatrccaagcattctaaattaattgcttgaaagtcactatgattgtgtccattataaggagacaaattcattcaagcaagttatttaatgttaaaggcccaattgttaggcagttaatggcacttttactattaactaatctttccatttgttcagacgtagcttaacttacctcttaggtgtgaatttggttaaggtcctcataatgtctttatgtgcagtttttgataggttattgtcatagaacttattctattcctacatttatgattactatggatgtatgagaataacacctaatccttatactttacctcaatttaactcctttataaagaacttacattacagaataaagattttttaaaaatatatttttttgtagagacagggtcttagcccagccgaggctggtctctaagtcctggcccaagcgatcctcctgcctgggcctcctaaagtgctggaattatagacatgagccatcacatccaatatacagaataaagatttttaatggaggatttaatgttcttcagaaaattttcttgaggtcagacaatgtcaaatgtctcctcagtttacactgagattttgaaaacaagtctgagctataggtccttgtgaagggtccattggaaatacttgttcaaagtaaaatggaaagcaaaggtaaaatcagcagttgaaattcagagaaagacagaaaaggagaaaagatgaaattcaacaggacagaagggaaatatattatcattaaggaggacagtatctgtagagctcattagtgatggcaaaatgacttggtcaggattatttttaacccgcttgtttctggtttgcacggctggggatgcagctagggttctgcctcagggagcacagctgtccagagcagctgtcagcctgcaagcctgaaacactccctcggtaaagtccttcctactcaggacagaaatgacgagaacagggagctggaaacaggcccctaaccagagaagggaagtaatggatcaacaaagttaactagcaggtcaggatcacgcaattcatttcactctgactggtaacatgtgacagaaacagtgtaggcttattgtattttcatgtagagtaggacccaaaaatccacccaaagtcctttatctatgccacatccttcttatctatacttccaggacactttttcttccttatgataaggctctctctctctccacacacacacacacacacacacacacacacacacacacacacacaaacacacaccccgccaaccaaggtgcatgtaaaaagatgtagattcctctgcctttctcatctacacagcccaggagggtaagttaatataagagggatttattggtaagagatgatgcttaatctgtttaacactgggcctcaaagagagaatttcttttcttctgtacttattaagcacctattatgtgttgagcttatatatacaaagggttattatatgctaatatagtaatagtaatggtggttggtactatggtaattaccataaaaattattatccttttaaaataaagctaattattattggatcttttttagtattcattttatgttttttatgtttttgattttttaaaagacaatctcaccctgttacccaggctggagtgcagtggtgcaatcatagctttctgcagtcttgaactcctgggctcaagcaatcctcctgccttggcctcccaaagtgttgggatacagtcatgagccactgcatctggcctaggatccatttagattaaaatatgcattttaaattttaaaataatatggctaatttttaccttatgtaatgtgtatactggyaataaatctagtttgctgcctaaagtttaaagtgctttccartaagcttcatgtacgtgaggggagacatttaaagtgaaacagacagccaggtgtggtggctcacgcctgtaatcccagcactctgggaggctgaggtgggtggatcgcttgagccctggagttcaagaccagcctgagcaacatggcaaaacsctgtttctataacaaaaattagccgggcatggtggcatgtgcctgtggtcccagctactagggggctgaggcaggagaatckttggagcccaggaggtcaaggctgcactgagcagtgcttgcgccactgcactccagcctgggtgacaggaccagaccttgcctcaaaaaaataagaagaaaaattaaaaataaatggaaacaactacaaagagctgttgtcctagatgagctacttagttaggctgatattttggtatttaacttttaaagtcagggtctgtcacctgcactacattattaaaatatcaattctcaatgtatatccacacaaagactggtacgtgaatgttcatagtacctttattcacaaaaccccaaagtagagactatccaaatatccatcaacaagtgaacaaataaacaaaatgtgctatatccatgcaatggaataccaccctgcagtacaaaggaagaagctacttggggatgaatcccaaagtcatgaygctaaatgaaagagtcagacatgaaggaggagataatgtatgccatacgaaattctagaaaatgaaagtaacttatagttacagaaagcaaatcagggcaggcatagaggctcacacctgtaatcccagcactttgagaggccacgtgggaagattgctagaactcaggagttcaagacmagcctgggcaacacagtgaaactccattctccacaaaaatgggaaaaaaagaaagcaaatcagtggttgtcctgtggggaggggaaggactgcaaagagggaagaagctctggtggggtgagggtggtgattcaggttctgtatcctgactgtggtagcagtttggggtgtttacatccaaaaatattcgtagaattatgcatcttaaatgggtggagtttactgtatgtaaattatacctcaatgtaagaaaaaataatgtgtaagaaaastttcaattctcttgccagcaaacgttattcaaattcctgagccctttacttcgcaaattctctgcacttctgccccgtaccattaggtgacagcactagctccacaaattggataaatgcatttctggaaaagactagggacaaaatccaggcatcacttgtgctttcatatcaaccaygctgtacagcttgtgttgctgtctgcagctgcaatggggactcttgatttctttaaggaaacttgggttaccagagtatttccmcaaatgctattcaaattagtgcttatgatatgcaagacactgtgctaggagccagaaaacaaagaggaggagaaatcagtcattatgtgggaacaacatagcaagatatttagatcattttgactagttaaaaaagcagcagagtacaaaatcacacatgcaatcagtataatccaaatcatgtaaatatgtgcctgtagaaagactagaggaataaacacaagaatcttaacagtcattgtcattagacactaagtctaattattattattagacactatgatatttgagatttaaaaaatctttaatattttaaaatttagagctcttctatttttccatagtattcaagtttgacaatgatcaagtattactctttcyttttttttttttttttttttttttgagatggagttttggtcttgttgcccatgctggagtggaatggcatgaccatagctcactgcaacctccacctcctgggttcaagcaaagctgtcgcctcagcctcccgggtagatgggattacaggcgcccaccaccacactcggctaatgtttgtatttttagtagagatggggtttcaccatgttggccaggctggtctcaaactcctgacctcagaggatccacctgcctcagcctcccaaagtgctgggattacagatgtaggccactgcgcccggccaagtattgctcttatacattaaaaaacaggtgtgagccactgcgcccagccaggtattgctcttatacattaaaaaataggccggtgcagtggctcacgcctgtaatcccagcactttgggaagccaaggcgggcagaacacccgaggtcaggagtccaaggccagcctggccaagatggtgaaaccccgtctctattaaaaatacaaacattacctgggcatgatggtgggcgcctgtaatcccagctactcaggaggctgaggcaggaggatccgcggagcctggcagatctgcctgagcctgggaggttgaggctacagtaagccaagatcatgccagtatacttcagcctgggcgacaaagtgagaccgtaacaaaaaaaaaaaaatttaaaaaaagaaatttagatcaagatccaactgtaaaaagtggcctaaacaccacattaaagagtttggagtttattctgcaggcagaagagaaccatcagggggtcttcagcatgggaatggcatggtgcacctggtttttgtgagatcatggtggtgacagtgtggggaatgttattttggagggactggaggcagacagaccggttaaaaggccagcacaacagataaggaggaagaagatgagggcttggaccgaagcagagaagagcaaacagggaaggtacaaattcaagaaatattggggggtttgaatcaacacatttagatgattaattaaatatgaggactgaggaataagaaatgagtcaaggatggttccaggctgctaggctgcttacctgaggtggcaaagtcgggaggagtggcagtttaggacagggggcagttgaggaatattgttttgatcattttgagtttgaggtacaagttggacacttaggtaaagactggaggggaaatctgaatatacaattatgggactgaggaacaagtttattttattttttgtttcgttttcttgttgaagaacaaatttaattgtaatcccaagtcatcagcatctagaagacagtggcaggaggtgactgtcttgtgggtaagggtttggggtccttgatgagtatctctcaattggccttaaatataagcaggaaaaggagtttatgatggattccaggctcagcagggctcaggagggctcaggcagccagcagaggaagtcagagcatcttctttggtttagcccaagtaatgacttccttaaaaagctgaaggaaaatccagagtgaccagattataaactgtactcttgcattttctctccctcctctcacccacagcctcttgatgaaccggaggaagtttctttaccaattcaaaaatgtccgctgggctaagggtyggcrtgagacctacctgtgctacgtagtgaagaggcgtgacagtgctacatccttttcactggactttggttatcttcgcaataaggtatcaattaaagtcrgctttgcaagcagtttaatggtcaactgtgagtgcttttagagccacctgctgatggtattacttccatccttttttggcatttgtgtctctatcacattcctcaaatccttttttttatttctttttccatgtccatgcacccatattagacatggcccaaaatatgtgatttaattcctccccagtaatgctgggcaccctaataccactccttccttcagtgccaagaacaactgctcccaaactgtttaccagctttcctcagcatctgaattgcctttgagattaattaagctaaaagcatttttatatgggagaatattatcagcttgtccaagcaaaaattttaaatgtgaaaaacaaattgtgtcttaagcatttttgaaaattaaggaagaagaatttgggaaaaaattaacggtggytcaattctgtyttccaaatgatttcttttccctcctactcacatgggtcgtaggccagtgaatacattcaacatggtgatccccagaaaactcagagaagcctcggctgatgattaattaaattgatctttcggctacccgagagaattacatttccaagagacttcttcaccaaaatccagatgggtttacataaacttctgcccaygggtatctcctctctcctaacacgctgtgacgtctgggcttggtggaatctcagggaagcatccgtggggtggaaggtcatcgtctggctcgttgtttgatggttatattaccatgcaattttctttgcctacatttgtattgaatacatcscaatctccttcctattcggtgacatgacacattctatttcagaaggctttgattttatcaagcmctttcatttacttctcatggcagtgcctattacttctcttacaatacccayctgtctgctttaccaaaatctatttccccttttcagatcctcccaaatggtcctcataaactgtcctgcctccacctagtggtccaggtatatttccacaatgttacatcaacaggcacttctagccattttccttctcaaaaggtgcaaaaagcaacttcataaacacaaattaaatcttcggtgaggtagtgtgatgctgcttcctcccaactcagcgcacttcgtcttcctcattccacaaaaacccatagccttccttcactctgcaggactagtgctgccaagggttcagctctacctactggtgtgctcttttgagcaagttgcttagcctctctgtaacacaaggacaatagctgcaagcatccccaaagatcattgcaggagacaatgactaaggctaccagagccgcaataaaagtcagtgaattttagcgtggtcctctctgtctctccagaacggctgccacgtggaattgctcttcctccgctacatctcggactrggacctagaccctggccgctgctaccgcgtcaccyggttcacctcctrgagcccctgctacgactgtgcccgacatgtggccgactttctgcgagggaaccccaacctcagtcygaggatcttcaccgcgyrcctctacttctgtgaggaccgcaaggctgagcccgaggggctgcggcggctgcaccgcgccggggtgcaaatagccatcrtgaccttcaaaggtgcgaaagggccttccgcgcaggcgcagtgcagcagcccgcattcgggattgcgatgcggaatgaatgagttagtggggaagctcgaggggaagaagtgggcggggattctggttcacctctggagccgaaattaaagattagaagcagagaaaagagtgaatggctcagagacaaggccccgaggaaatgagaaaatggggccagggttgcttctttcccctcgatttggaacctgaactgtcttctacccccatatccccgcctttttttcctttttttttttttgaagattatttttactgmtggaatacttttgtagaaaaccaygaaagaactttcaaagcctgggaagggctgcatgaaaattcagttcgtctctccagacagcttcggcgcatccttttggtaaggggcttcctcgctttttaaattttctttctttctctacagtcttttttggagtttcgtatatttcttatattttcttattgttcaatcactctcagttttcatckgatgaaaactttatttctcctccacatcagctttttcttctgctgtttcaccattcagagccctctgctaaggttccttttccctcccttttctttcttttgttgtttcacatctttaaatttctgtctctccccagggttgcgtttccttcctggtcagaattcttttctcctttttttttttttttttttttttttttaaacaaacaaacaaaaaacccaaaaaaactctttcccaatttactttcttccaacatgttacaaagccatccactcagtttagaagactctccggccccaccgacccccaacctcgttttgaagccattcactcaatttgcttctctctttctctacagcccctgtatgaggttgatgacttacgagacgcatttcgtactttgggactttgatagcaacttccaggaatgtcacacacgatgaaatatctctgctgaagacagtggataaaaaacagtccttcaagtcttctctgtttttmttcttcaactctcactttcttagagtttacagaaaaaatatttatatacgactctttaaaaagatctatgtcttgaaaatagagaaggaacacaggtctggccagggacgtgctgcaattggtgcagttttgaatgcaacattgtcccctactgggaataacagaactgcaggacctgggagcatcctaaagtgtcaacgtttttctatgacttttaggtaggatgagagcagaaggtagatcctaaaaagcatggtgagaggatcaaatgtttttatatcaacatcctttattatttgattcatttgagttaacagtggtgttagtgatagatttttctattcttttcccttgacgtttactttcaagtaacacaaactcttccatcaggccatgatctataggacctcctaatgagagtatctgggtgattgtgaccccaaaccatctctccaaagcattaatakccaatcatgcgctgtatgttttaatcagcagaagcatgtttttatgtttgtacaaaagaagattgttatgggtggggatggaggtatagaccatgcatggtcaccttcaagctactttaataaaggatcttaaaatgggcaggaggactgtgaacaagacaccctaataatgggttgatgtctgaagtagcaaatcttctggaaacgcaaactcttttaaggaagtccctaatttagaaacacccacaaacttcacatatcataattagcaaacaattggaaggaagttgcttgaatgttggggagaggaaaatctattggctctcgtgggtctcttcatctcagaaatgccaatcaggtcaaggtttgctacattttgtatgtgtgtgatgcttctcccaaaggtatattaactatataagagagttgtgacaaaacagaatgataaagctgcgaaccgtggcacacgctcatagttctagctgcttgggaggttgaggagggaggatggcttgaacacaggtgttcaaggccagcctgggcaacataacaagatcctgtctctcaaaaaaaaaaaaaaaaaaaagaaagagagagggccgggcgtggtggctcacgcctgtaatcccagcactttgggaggccgagccgggcggatcacctgtggtcaggagtttgagaccagcctggccaacatggcaaaaccccgtctgtactcaaaatgcaaaaattagccaggcgtggtagcaggcacctgtaatcccagctacttgggaggctgaggcaggagaatcgcttgaacccaggaggtggaggttgcagtaagctgagatcgtgccgttgcactccagcctgggcgacaagagcaagactctgtctcagaaaaaaaaaaaaaaaagagagagagagagaaagagaacaatatttgggagagaaggatggggaagcattgcaaggaaattgtgctttatccaacaaaatgtaaggagccaataagggatccctatttgtctcttttggtgtctatttgtccctaacaactgtctttgacagtgagaaaaatattcagaataaccatatccctgtgccgttattacctagcaacccttgcaatgaagatgagcagatccacaggaaaacttgaatgcacaactgtcttattttaatcttattgtacataagtttgtaaaagagttaaaaattgttacttcatgtattcatttatattttatattattttgcgtctaatgattttttattaacatgatttccttttctgatatattgaaatggagtctcaaagcttcataaatttataactttagaaatgattctaataacaacgtatgtaattgtaacattgcagtaatggtgctacgaagccatttctcttgatttttagtaaacttttatgacagcaaatttgcttctggctcactttcaatcagttaaataaatgataaataattttggaagctgtgaagataaaataccaaataaaataatataaaagtgatttatatgaagttaaaataaaaaatcagtatgatggaataaacttgagagtccagaagttatcccatacatctgtaatcaactaatttctcacaagggtgtaaggaccattcaatggagaaaaaatgatcttctcaacaaatggtgctgagctaattggatattacatgcaaaggaatgaatttgagtctctactacacaccatatataaaaattaattaaaaattcatcaaatacctaaatattagagactaatttataaaccgtagagagaaacataggtaaaaatgtttatggctttagattaggcaacagcttcttaattatgacatcaaaagcacaagcaaccaaagacaaaaataaataagttggacttcatcgaaattaaaaatctttgtgcatcaaaggacacttagtaagaaagtgaaaagacaacccacagaagtgggagaaaacacttgcaaatcatatatctgataagggttgtgatattatgatatatatataggtttttgtccatagttcctggcttataaaccccctcacccttgttacagtcatttgttataaggttggatggtttaggcctcagaagcaaaactctctctctcaccttctccagccctcctgtctctggcacctcattcttccctgaggccacatagaaactagaatctctcttccacaaggcggtcaaagaaaccagcacctcctttcccccaaaccagtcataaaacctaaaaatattactctaattccccctcctttccatataagcactggctataaggaaataatctgactgggcatgatggttacgcctgtaatcccagcattatgggaggccgaggcaggcaggtgccctgagccttggagttcaagaccagcctgggcaacacagtgagaccccatctctaaaaaacttagccaggcatggtagcacacatctgtagtcccagctactcttaaggctgtctcaaaaacaaaaaataaacaaaaaactgacctatcttgttggattgtagatcacgagaccctcattccagacagggtcctgcccatatcctgggtgaaggaatgctgcacagagaggccaagaagaatctgaacagacacgccttactgggtttccccagtctatcagcattagatcatatccttttttctttttcttttttgagacagagtctagctctgtcacccaggctggagtgcactggcgcggtttcagctcactacaaccttcgcctcctgggctcaagcaattctactgcctcagcctcccgagtagctgggactacaggtgcctgccaccacgcctggctaatttttgtatttttagtagagatggggattcaccaaattggttaggctggtctcgaactcctgacctcgggtgatctgcccaccttggcctcccaaagtgctggggttacaggcgtgagccactgtggccggccttgatcatatccttttttctaatcacaattttacaggttgtccacgcttcagttatgcctatccaatgaagtctccataaagcccaagaagacagggtttagggagctttcagagagctaaacacaagaaggtaaacaaaaactcacccatgtctacagtgcaggtctacagaaaaatacaaaaacaaaaacaaaaaaaatccaaactcatctgtgtcctgggagggtggcataccagaactcgggggggatagaagtttctgtgctcaggacccttccagaccttgccctatgtatctcttcatctggctgtttatttgtgtcattatcctttgtaataaaccagtaaacataagtatttccctgagttctgtgggcagtcctaatgaattaatcaaacccaacaaaggtcatgggaaccccaacttgaagtaactggtcagcagttccagaggcctggacttgtgactggtgggagggtggggatgatcttgtgggactgaaccctcaacctgtgggatctgaaactatgtccaggtagatagtatctgaattgaactggaagatacccagcttgtgcctgctgcagaatagattgcttgcattgattacagaagtgttctgtgttgactgttgctgtggtatgagaacagagggaaaaacagtttgtgtattttttctgctcaagagtctagtatccagaacatataaagaactcttaggttggacacggtggctaatgtctgtaatcccagaactttgggaggctgaggagggaggattgcttgagcccaggagttcaagactagcctgggaaacatggtgagacccaatctctacaaaaaatttaaagaaattagctggacggggtgctgtgagcctgtggtgccagatacatagaaggcagaggcagatgatctcttgagcccagcaagccgaggctacagcgagccgtgtgcacaccactgtactctattgtgggtgacagagcaagattctgtctcaaaaaaaaaaaaaaaaaaaaaaaaaagagagtgagagagaagaaaactcttataattcaacaacaacagacaaacaacctcatttaagaatggccaaatggccacttaaaaaacttaagtagacatttcttcaaatatttacaaatggccaataagcacatgaaaagatgctcaatatcattagtcactagggacatgcaaattaaaaccacaatgaaatactattttatacccactagcgtggctataaacaaagaaacaaacaaaaaaaaacccaataacgagtactgtagaaatcggaaccctcatatattggctggtgaaaatataaaatggtgccgcagttgtggaaaacagtttggcagttcctctaaagttaaacatagaattaccgtatgacccagcaactctactcctgggtatatatctaagagaattagagacatgtgttcaaacaaaaacttgtacaggaatgttaaaaaaacatattcataatggccaaagagtagacacactatcaactaatgaacaaataaacaaaaggtggtatatctatacaatggaattttattcagccataaaaatgaatgaagtgctgatgcatgctacaacatggataaaccttgcagacattgtgctatgtgaaagaatttagacacaaaaagtcactcattgtatgattccacttatataaaatgtccagaataggaaaatccatagagacagaaagatctgtggttgtcatggactggagggagggggaaatgaggagtgtctacttaatgggtatgagatttttcttttgagggtgatgaaagtagcctgaattagatagtagaattatatacattttttaagtcagtatgactttttgttttttttttgagatagagtcttactctgtcacctaggctagagtacagtggcatgatcttggctcactgcaacctctgcctcctgggctcaggtgattcttgtgcctcagactcctgagtagcttaaattacaggtatgtgccaccacacctggctaatttttgtattttcagagagacagggtttcatgatgttggccaggctggtctcaaactcttggcctcaagtgatctgcctgcctcagcctcccaaagtgctgggattacaggagtgagctaccgtgccgggcctgtcagtatgacttcgaagtcaagtaaacctaaactagagttctggttccatgtgacaatgggttagatgtttaatctctgtaaagccttaatttctttcctctctgtaaaatgggtccattaatattaacatttcacgtatctttggcttttgcctgtatctcagcactttgggaggctgaggagggtggatcgcttgagcccaggagttcgagaccaacctgggcaacagagcgaaacctcatctgtacaaaaattacaaaaattagctgggcttggtagcgtggacttgtagtcccagctactcaggagggctaaggtgggaggattgcttgagcccagggggcggaggttgcagtgagccatgatcacaccactgcacaccagcctggatgacagagtgagatcctgtctcaaaataataataatattattattattattatttttggtaagtattaaattagacaataatagaaagttgatgctgtctccctgaatggcactgccatcctttctgtttgcaagccagaaacttagaaattacccctgacctcaacctctgcccccatggctagttgtataaattttgttttctaactgtctcttgaatttacgtttctctatctcctctactatcccctgagaaagatgaaaagaaagcagcccctgacagttgaaagctggcttgatactcacagctaagacaaattattttcctattggacgtaacagtctcccaacctcagaaaaagttactctaagactatgataaaataagagaaagcaaagcctcttcataattttttctaaatacacaaaacgaacaaacaaatatgttcactgtgccacccacaaaatatcaaacacaaaatatcaaacatccctctcttggctaaaaaggaatgactgctacattttctttcttcttttttaatcttaaattgtcctttcctgccagccctattcttaggagacggccctcctaaactgagagggagattgctgtgcgtcctgccagactactctgctaggactgagcgcgggggagcagaaatggcctaggccaggacaagtgactgctacttctttaccaattacagctttatccttgttctaacctgccctccctgagataatatctattcacatccccaattacagaattgacccgattccctaacaacatctaatccagagcaaatcttcattttatttgaccttccctccaaatcacccgactgtcatgagtggtgtaaggttagaaataaccaagtctatgtatttttgtgtgtttttacaatgttaggattttatcgatgttattttaatcacaaaagttacagattatatggagttcttaaggaggccatttttttaaagtactttttgtttctttggtagtcagagccccagagacacgggctcaagtcactttataagtcagtcaatattgtaaaccatacattattatagtatattaaattaatatataaatattataggttaagtattttacgataaacaaagtaacatttaacattaaaaaaagagagagagagagagctaggagaaagggttaatgaactagtttagtaggagtgaagatgataaaaggagtccgggtctggggtgggtggtttgctggtcatgtaaggaaaactgggaggtggtagagcctttggtggcagatgccaggtttttatcatgagtgactgcaagaaagtgtcacttaggatggctgttttgagttgttgaagggctaatctgtttcatattcatagagtatttggtgagaactgatagtggaagagtgtgtttgtgtttttatctggttgtatgcagcctttaaaaaaaattaatttattaaacagaacgtgttattcttattggcaaagtgccctatgaaatgtaaaatggcgtcttttttaataagatggagttagttatgtctttttgttgttttattttgagctggagtctcactctgttggagtgcaatggcgtgatctctgctcactgcaacatctggcttctgggttcaagtgattctcccgcctcagcctcctgagtagctgggattacaggcatgcatcaccacacccagctagttgttttttttagtagagatggggtttctccatattggccaggctggtctcgaacttctgacttccagtgatcctcctgccttggcctcccaaagtgctgggattacaggcatgagccaccacgcccggctggagttagttacatgaagggtgctctatacgcttaccaaagtccaacttctattactcgttctttctaacaccctctcagtgagacaactcatagctcatgtctccccatgatgtgtgctctcccctcactgcaatgagtaatagacccaatttgttcaacgctaggtgtgctcctg

SEQ ID NO: 95268 - DNA, 58657 bp, Homo sapiens
  misc_feature (1)...(58657): n = A,T,C or G
cattttgccaaaaatgccaaaagtgcactgaatgagttctctagcaataatccacagaaattttatatttatgctgccccagtattctcaattccattcaaagaattagactctagctttagcacagcaagaaatcacatcagctaatctataaacatcttctgatggcatattcctttagacacatcttgttgaactcccaatgcactaatttaaaacttaatgcaaaataatttctttagtaggacagcatttccatcaaataattctatttgcataagggaagttatgatgttgctactctgacctggttgcccccatatcggtgagccagtggaacggatccaaacactgtcttttcgccacttacaaggtggataaaatcatctgtttctgaaacagataaatcaaggtccaaaatattttctagaacttcctgaggcaggaaaaacaaatttacaaaccgatgtcatctttcacttttttgggttttttttgttttgttttttttgagacacaggctcactcagttacccaggctggagtgcagaggcacaatcatggctcactgcagctttaacctcctgggctcaagtgatcctcccgctttggcctcctaaagtgctatgattacaggatggagctagggcacccggactaataatttttaagaatgagacttaatggaagaaaattcaaagaataaacctcttctgaaaatatattattaattttttttcataagagatgtaccatactgtctatgtttatgctatttgggaaaaattagttctactagatggttctaaaatttttatggctttcttatgatgcatggtaaaacaatatttttcctaggacaaattcatttaagaaactacaaaaaaagtcctatttttagcccaaattcatttatgtcatgggagaaaaatttagaattagagaccattagataaaggatatgtaagataacaatttaactcattttcctctttttcacaaaagcatatttttcttgtaagacaactttaagttgaaactgagtaagtatcagtgtgatttataagaatgacatctccaagtatttgaattttaaacacagtcatttataattagactaataatattaactctaaaaaattattttaaacaaatattttagtgagttaagtatttgtgttgtgaaaaactaatgcctaacctttgaaactgctacaagacgtactcttgatttgaaaggagttcagaaaaagatacataaaatacagttttccactttatgaacataattttctttaacaggatcaacaggcaacatagctgataaaataaaacatccttcttaatgttctcatttgttgcatatacagcactaatatcccttagaaagtctatggttcttcaagaaactcaagtcactattttcttcatgctttgttatttaaaggctactttgtaatttcaacacaatctagccaacattcatttaggtcagtatatcatggaactgttcaagagcctaggaaatggaaaaggtttaaaacaggaagacacataccctgtcttcaaagatcttcactcttggaaggcatatcagatttatatatatatatatattctttttgagatggagtttctctcttgttgctcacgctggagtgcaatggtgttatcacggctcattgcaaactccgcctcccagtttcaagtgattctcctgcctcagcctcccacgtagctgggattacaggcatgtgccaccatgcccggctaattttgcatttttagtaaggatggggtttcatcatgttggtcaggctggtctcaaactcctgacctcaggtgatctgctcacctcggcctcccaaagtgctgggattacaggcatgagccaccgcgcccagccaacaaatatatatttttaaatggaggtgagctgcattacagaattacaagtatagtactagttaattcaatggaaccaaaatccattaggcacacaatcacatgcattctgccctttggaaacacaattagctaaaggaaacaggtagacaagagacataaataccttaagaccaggcaatacatggcttactagatgcacaaaactgctgtagatcccacatatgatagctgcccgcccacaaagctaaaagtttagaaattgcctctgcagaaacaaactatgtctcataaagtccatacactgaaacacatttaccatattttaaaagctgtagaggaaaagaaagctttgaacacactttagattcgcagaacatatttactcttattttataaataacacctaaaatcgtcatgtttttccaatccaaagcaattaaaacaaaaaaaaaatagaagacagtaggtgtattaataaaactataagactaagggacaaaaaaacttgtttctggatacagatttattgtcaaaatgtgtcaccaaattatttaataaacataataggaatccaattaatagcctagcaggatttttttgaagaaatagacaatcttagtgtgcaaatctgaaaaaataaacgataaattttttaagagaaacaagtttgcttatattaaaaattaaaagaatacagtaacaaaaaatattgctattctaaaaatagatgtaaagatcagtggaactcaataaaaagtgcagaaacaaccaaaagctgtaaaagaatttcctatacagtgaaaataacatttcaaatcactggagacaggtagcattaggataatttgctccactgtctggagtaacaccaatttattccatccaggcttaagtgaactaagtatcagttacaacagcaagtttctatcttattcaaatcagtaataaaagcaggctaatatgggccatatgggccacttttagccctttatatgttcccttaagtccatgatgtattataaggtagcatcctgggggaataaatgtgtactcaatcaaaaagtggcagattttagcattcacaccagaaaaccagacaatatgattataagtggaagaaccaacagtatattttctgcttttgtgggagagcctctgagtggaatgaactagattatataattaacacaatctcctttatgatgctctaacattggtagggcaggggcagcatatcacattccattagtagttatcattttgtaccactcgatgcacgtcccggtaagacagctgctggtcaatagatgtgatcaccagccatggaacaaaaaaggctatttcaggcatattaaaccctcacccatgtgatgctttaacaagctaatgagtcatagactaaaaaccccagagaaaattccaaaagcatactaaccccttctcttaagatctcaggaaaatcagtactggcaactttaaattctttagaattccgttttgcataagactatgaaatccacaaaaactaacaacaaacaaaaggttagtgaaactaatctttcactgcaaatgtttgaaccttttctctcaataaatgtgcttaccagagtaagataatttggataattcattgatcatttatttagtaaaatcaggatgagatgttttacacagtactgtaaatcaagacacagtaatacataggattatttatttatttatttggagacagtgtcccactctttcatccacactggtatgcagtggcatgatcacaactcactgcagcctcgaactctcgaacttctgggctcaagcaaatttccccacctcaggctcctgagtagctagggctacagtcacacaccaccacgcctggctaattttattttttgtagagacagggtcttgcttatgtcgcctaggctgttcttgacatcccgacctcaagcaatcctgccacgtcggcctcccaaagtgctgtgataacaggcatgacccactgtgtctggcctggtactatatttacaatctctttggctataaaacctgttcctattgtagatattatgttttaaacagtatcatcaatatggcaagaaaatgtcttggagggtacctaacactccaacctcaaaacgacaaccttgatcgctttcagttacacataggccattttgatccatctgtactggctcttttcatttgtctaagggcagcaaaatagactaaagttgttttcagactgcacaagagaagtctgttctttagcacttacctgcataactcagatagtgtttttaacttcctcaactcatgcttggcctagttgggtcaaaagaactacttgtgaattccgtatgtccaattggtaggttactgttttttctcaagagtttagctatacagtaatgttggaagtcttgaggaacttcagctgctgtccctacttagccttgcaatactacggcatcttttcttctttttcttttttttaaagacggagtctcactttgtcacctaggccgaagtgcagtggcacaatctcggctcactgcaacctctgcctcccaggttcaagtgattctcttgcctcagcctcctaagtagttgggattacagaacatgcaccaccatgcccaactaatttttaaatatttagtagagacgggtttcaccatgttggccaggctggtctcaaactcctgacctcaagtgatccacctgcctcggcctcccacagtgctgggattacaggctgagccactgtgcccccgacctacagcatctttttaagagcaatgttttctgttttaatgtggccaagcaatctctaaacgaacatggtctgacaaaattgtgtagtgacatacttgacaactgggtgagcttgagtgtgatacttatttgaccatacggtatttcctctatatgtttccttatctttatatacaaaaaagggcaaatgataatgtcttagtcataggatcaagtacaacccaagtgcttactgctacactctacttggcaaattccaccttatgaatgtttcttaatatataaacctaatctaaaccaagataagctacaggtgcatattaacaatctttactcataaagttttgcatatttttacatactattcttcaagatggaaaaaacaccatcaaactggcttattttcatagatgtctttatatagtctatgatgtcttcattccataaaaaatccacacgattaaatatgaaattaatgtacccagctatgaggctaccgcattctttaacccaagaacaagaaaatacatgaatcagagaactgcaattacctacttgctggtctatttcctcattagagtgaattttttgaggactaaattgcatttctctatctctaatgcttaccccctatctcactggctctgtgtgtttgagtgcatgcgctgaatgtttatatcacttaatttctgttcggaacacgctgtctcttagcaccagtagatctggccttagagctaaggaaagaaggcctttctaacccataaggggtactaatcctgtacagactccaatatctcccgggctgggtacacgcaggttcacacccaggtgtgagcaagattgccaaactatacctataaggcgtttggaggrgagagtccaaaagtcacgagacccggctaatttagctactatttcacaacaaccctgatcgtggtcggacttgtttctaggaagatgcgatgggctggaacttccttcaagaacagattgcaaaaggcagccgaccagggcgtgtcaggtcactgccaagggaagcagcagcggaaaccgtcgcctccggcttaggctgcggagcgggaaccccattctctgagttatgtttctgcctaaacacgcagaacaaaagagttcgtggctgcaagggtggcgcgcggtagtatttcttgctaataaaaggtccccacagggacatttttgctatgactgcaggcgtggccagtctccctgcacagcttccgggaagaggtggggataggaggctcgccccggggaaggtyacgctcggggtccccagaccaggtctccgcacgcccctgccccgtcgcctcccgggagcggctgcagtccccgttggctgcagacgggcagacacccgaagtgtccgcgccggcagccggaccgcaagcgaggaagagcgaaccgcgctcccgggcctggccgaagcgcttcctgtgccaggtttccggctccgggtcccgggaggaggatcgcgggccagaggcggagccgccgccctgccgcgactttcagactccgaccatggcctcgcgctggtggcggtggcggcgcggctgctcctggaagccggcggcgcggagccccgggcccggctcccccggccgtgcgggaccgttggggccgagcgccgctgccgaagtccgcgcgcaggtgaggttgggaggcgcgcgcccggcggggctcagaggtcacggctccaatgacagcagtgggcggaatgaatgggagcggggagcacgtgcgtcgcgacgcgggggcgcgcggggtagctccggggtagctccggggtgggactccggagctgaggggtgcycgcggtgggacggagccgcgcgttggactgaagtaggggcgccctacacggggttgcagaaagcggtgtcctggggaccccgggagcgttttggggggtggagaaagcggtgggatccgtgtcctggsggaagcgcaggagcgatcagattgaccgctgctatatggacaaggttaattaagcctggagagcgactgcagctatttactttggagttagaggaagacagatcttgcctgaaattttagagccaaagtgctcagagctctctccgagaaacggaggatcgaatcggcctcggaatagtccgaaaaggtcttgtggagaatgcagggctggtgctagggtggaccggaccttagttgtccagcagtggcytcgggaggagagcacacctggatggggctggaatgacactggaaggagaaaggcccgaggccgtcaggaggagagaaaccctggagtcatctaaagtcagaatctcagygatagcccattctttcagggtctcctctgctgcctttgggttccgatctcctttttctccctttctggtcagtttagcccctgtaaatggacactgtgagcccttctgcrctttgtaatgattctcagtgtgccatggggtaggcccatgctattagcataaccgtgcaaaatctatggactcactgttacttaagtttatttgaatttagtactcttttaattcagatttggtatactttatgtgtccgtgttctcatcaaacatcatttcccagtatgaartatataacacttataaatatctactttgtaccaaagtagatgcgtatcacaaattatccaaaacaaggcttgggccaggcrcagtggctcacacctgtaatcccagcactttgggaggctgaggtgggagaatcggttgaggccaggagtttgggaccagcctaggcaacatagcaagactctgtctctataaaaaatagaaaaaattcaccaggtggggtggtgcatgcctgtagttctacctactcaggagcctgagggaggaggattgttcgatcccaggagttcaagattacagtgagctgtttattgtgatagtgccagtgcactccagcctgggcaacagtgtgagaccctatctctaaaaaatctaaagcaaaaaagacgtttggagaccaagtggcagctgggcaactagacaatgctagagagtaaagagaacagaatatggggggtgaggggcaygtgggagaagaggcttagaggaggaaggtaggctttgctgtgatccatttcaggactgttctctccagacttcagatatttctagttccacagaagaagccagtatttgaagagatgggtgcatccaccctcttatgccactacatgcttcttcttcttcttcttttttttttttttttgacacagagtctcactctgtcgcccaggctggagtgcagtggcggaatctcggctcactgcaaactccacctcccaggttcaagcgattctcctgctgcagactcccaagtagctgggattacaggcgtacaccacgacccccagctaatttttgtatttttagtagagacagcatttcaccatgttgcccaggctggtctggaactcctgacctcaagtgatccaccccctcctcggcctcccaaagtgcggggattacaggtgtgagccaccacgcctggcctgacacttctttttaaaaaagtttcttgcccaccaagcaaccttagccagggaaagtgtgcttttctggagagaatatgctttatggcctccccgtctgcatgacgacaaggaggaattctgtggactcatgatgccaagatcatgtatttctgatgtgtgtgtcagtgatgcctttcactataygttaatatgttagcattctggtgtctgcctcaggcatgtgtattttggttacttcaagtctcttagggcctgatagtccttggggacacagaactacaataactaagccacagggacaaagagcggcaataattaagccacgtcttgctctccaccagagctctactacctcctaatggttgtacattcttctgacttcactagtagtgtgaacaaatattgtaatacaataaaaaccagtgtgcatgtgatcgtgccaaatcacttctcaatatatctttgattttttttttttaatttatttttttagagacggggactttttgtgttggccaggttggtcttgaactcttggactcaagccattcccccctcccccccaccccgcttgaggattggcacacggccatgtatttgattcttacccagcactttctctttagctgagcgtggtggctcacgcctgtaatcccaacagtttgggaggccgaggcaggagaatccctttagctcaggagttcgagaccagcctgggccacttagtgagacctcctgatayggtttggctctgtrtgcccacccacatctatctcgaaytgtaatccccaattayatttggggaccagggagggtcaagggagggaccaggtggaggtaattggatcatgggggtggattcccccatgctgttctcatgatagggagttctcacaagatctsctggttttataagtgtttggtagttcctcctgtgttcattctgtctcctgccgccttgtgaagaaggtgcttgtttctccttctccttcttccaccatgattctaagtttctgaggcctccccagccattcagaactgtgagtcaattaaacctctttcctataattatarattgcccagtcatgggtaatttctttatagcagtgtgagaatggaccaatacagataattggtaccaaagtagttggcattgatataagatacctgagaatgtggaaattactttggaactgggtaacaagcagaggttggaatagtttggagggctcagaagaasaaaggaagatgtaggaaagtttggaaattcctagagtcttgttgaatggctttgaccaaaatgctgaaagtgatatggaygatgaagtccaggctgaggtggtctcagatggagatgaggagcttcctgggaaytgggcaaaggtcactcttgctatgctttagcaaagagactggtggcattttgccccaccctagagatctgtggaactttgagcctgagagagatgatctgaaattggaacttaaatttaaaggggaagcagagcataaacgtttggaaaatttgcagcctgaagatgtgatagaaaagaattttctggggaggaattcaagctggctgcagacatttgcataagtaacaaggagccgaatgttaatagccaagagaatggggaaaatgtctccagagcatgtcagagaccttctctgcagcccctcccatcacaggccaggaggcctaggagggaaaaatggattcatgggctgggcccagggccctgctgctctgtgcaagagcagccttgggacttggtgccctgcttcccagccgtagctaaaaggggccaaggtacagcttgggccattgcttcagagggtataagccccaagccttggtggcttccatgtgctgctgagcctgcaaggtgcacagaagacaacaatttgggaacttctgcctagatttcagaggatgtatggaaatgcctcaatgcccargcagaagtctgctgaaggggggagaaccctcatggagaacctctgttaggacagtgcagaaaggaaatgtggggttgcagcccccacacggagtccctgctggggcactgcctaatggagctgtgaaaggagggccaccgtgctctagaccccagaatggtaggtccaccaacagcttccaccgtgcacctggaaaagctgcaggcactcaatgccagcccatgagaatagcagtgggggttgaaccctgcaaagccacagaggcagagccacccaagttcttgggagcccaccctttgcatcagtgtgacctagatgtgagacatggagtcaaagatcattttggagctttaagtaatgactgccctgctgggtttggacttgcatgaggcctgtaagccccttcgttttggccaatttctaccatttggaatgggaacatttaaccaatgcctgtacccccattgtatcttggatgtaactaacttgtttttgattttacaggttcataggcggaagggacttgacttgtctcaggtaagactttggrcttggacttttgagttaatgctagaatgagttaagacttttgaggactgttcggaaggaatgattggttttgaaaaatgaggatatgagatttgggaggagcaaggggcagaacgatatggttggttctgtgtctctacccaaatctcatctcaaattttaatccccatgtgtcaaaggagggcctatgtggaggtaattggatcctgggggcagattcccccatgctgttcttgttatagcgaattcttatgagatctgatggttttataagtgattggtagttccttctgtgttcattctccttcctgctgcctagtgaagaaggtgccttgctttcccttttccttctgccatgattgtaagtttcttgaggcctccctagccgtttggaactgtgagtcagttacacctctttcttttataaattacccagtcttgggtatttctttatagcaatgtgaaaacrtactaatacacctcgtttctaaaaatcagctacgcattgtggcatgttcctgtagtcccagctactcagtaggctgaggtgggaagatagcttgagcccaggagattgaggctgcagtgagctatgattgcaccactgcactccagcctggaaaaataaaataaaagtaaattcatgagaggcaaggttgactttcagagagtgtgtgagggaaaggtaagaaacaaaatcggaattagaaaatgactgttgcccctctcttttcattcttcactgcttttctgagcacctctcacctccctttgaaaaactgctctaaagtacttttaaagcagaaaatagtagcttgattgaatagatactgtattaaatgtatattgtgtaccaggctctgagctaagagctttacatctgctctctaaattaatctccacctctctccatgagtaggtattatcagaaagacatcacaaggtaacacaaatgttgagatttgaaccgagatctgtcttccaaagtccatgctactaataattgttaggccacttggtggtaaaaagcgtcccctgtattaattagctgtgtaattttaatccttcaacccagattaggggtctataactgaataacyaaaaagttattcagttagaatagttcagttagttattwactaatcatagttatttggtcaagcgcagtgactcacgtctgtaattccagcacttggggaggctgtggcaggaggatttctaataatagtaactattactagagacctgataataattattaagtctcttactgaagaagttttactcttccattaagatgcccttatttataagtattataataaaatactgaactcatatgaattaattacccatgtagactgaaagacataggttgtcatataatggttgtcatataaagcatgaaggaggattgtcactttgttttcttgttgcactgtaattgcctgggatatcatgaaagttcttactggtttaatgaatatgtaatgctgtgggggaaagaatgaaactcaggccaactactttgactggtgtctggcaaagtcaactttcattgycattttaatatggcgccgggcgcggtggctcacgcctgtaatcccagcactttgggaggccaaggcgggcggatcatgaggtcaggagatcgagaccatcctggctaacacggtgaaaccccatctctactaaaaatacaaaaaattagccaggcgaggtggtgggcgcctgtagtcccagctactcaggaggctgagacaggagaatggcgtgaaccctggggggcggagcctgcagtgagccgagatagcgccactgcactccagcctggacgacagaacgagactccgtctcacaaaaaaaaaaaaaaaaaaatatggctagagcaatacatgttcattagagaagaatcagaaaatatctaccaaaagaaggaataaaacaaaacacccccacaatccgattcattccagaataactacttttaacaccctggtttgtgtgctttcaaactctgttctcccatttccaaagkatgttgaggaacacgaacttaaaatagacagtgtttgtataaatataaattccttccttgctattgaaatcttttttcctctgaccaatcttagttaaatggaaggaaattgttttaaaactaattttcaggtctggaaagatagatatgaatatggaaatgrctttctttgggggaagggatggactgaagatggttwttattttctccttttttcttatttatgttttctgcaatgacaagtattttgtaataacaaaaggaaactttaaaattattcttcctctaaagtttgcaatctacctgtaaatgggtgattagaagataaagattataattatgggggttttatcatccaatgttacagtttttcaggaatattcttacaagtttcttgacatttttattttatagataccctatattaatcttgtgaagcatttaacatctgcctgtccaaatgtatgtcgtatatcacggtaagtttacagtccatactgcaactactaaaattatccatttttaaatttattrttrttwaaaaawwtttttttgtagcgatggggagctcactgtgttgcccaggctggtcttgaactgctggcctcaagctatcctcccaccctcaggttcccaaagtgctgggaytgcagacataagcacccsgcctaaaattattaattatattgcctgtaaatttctattctaaattgtagatctctgcctattcaaaaaacaggaatataataaagtttgagctcaamccagarcacaatgaacatagtttagtttttctttgattttgtgggttctcaaggccctatttataaaagtgatctattgatctgtcatttagcaagaatagaattctgtatgtttttccaaattataatgaccttttcagattcatgattaatttctagcaaatatttgggctgaattttccgtatctgagtctmctaaatatatatgtatataaaacttacttgaaaatgaagtcatgtgcatttttgcatgtcccaggtttcatcacacaaccccagacagtaaaacacacagtggtgaaaaatacaccgatcctttcaaactcggttggagagacttgaaaggtctgtatgaggacattagaaaggtgagttttttattctgctgtratgtaatgttttagcttaccaaaacttactaaaattttattttattttttattcttataattattaytattttttgagctggagtctcactctgttrcccaggcttgagtgcagcggtgcaatctaagctcactgcaacccttgcctcccaggttcatgcaattctcctgcctcagcctcctgagtagctgagattataggcatgcgccatcacacctgggtaatttttgtatttttagtgaagacggggttttgctatgttggccaggctggtcttgaactcctgacctcaggtgacctacccrccttggcctcccaaagtgctgggattacaaaaaaacagtgcaggttttcagatctgtacaatgcagtttgcaatcttgattsacgtatggtcaagtttcaaatgtttcttgagaagaatacatatgacccagtgccaggcaatatgaagaatgcaatatgtatttatgtccagaaagaggttatggcagggttgggaacctgaaggaaaaaaatggtccaggtagctcatgcttgtccaatgagttatcccacctttcctcttaaaacccaccacctcccagtgactccagctgtctcttccttatctaattctgaatgtcattgccagtstgccccaaatatggctttcttcattcaactctttttcctgaaaactttcagtagttyccaacctcacgtggttgggcaccgtggctcgtgcctgtaatcccaccaatttaggaggccaaagcaagaggactgcttaagcccaggagtttgaggctgcagtgagccatgatcccgccattgcactccagcctgagtgagagagcaagacattttttctgtctttagaaaaaaattggctgggcacggtggatcacacctataatcctagcacttygagaggacaccacttcctgtttcacagacagtaggggctgtggaggaagaactccttcagctcctgctctgtcgcaattggccagcttgcctgcgccttctctggcgattgcctgctctcctcccacccgtggaagtcatgtcccttccctctctaggggcagtccyttagccaacctccctagtttcttaggaactcccccagacatggcctctccctctgtctgcaaactttcattggcatggtcttccatatccattgggtgttcagtttcttcacctgcatttttaaaaggcccatccactgacccagtgcttcactccctcccttccctcacagtatcccctgccctctgccttcctccagtgccttcatgttccctccactattgcactggggccccctttccagcctctcctctgaagctggttttgcttgggtcactgatagcttccctgtgctaaatccaatggatgtgttaccagcagcaaatttgtacaggtctgcagcaacctyaattcttgcctcctcagaagaaagaattcgactgaggggcctaaggcagaaggagagacggaggcaagttttagagcaggagagaaagtttattattaagtgtagagtaggaagggaaggaagtaaagtacacttgtaagagggccaagctggtgacctgagagaaaktgtggtttgaccttggaatttgggttttagatgttggcatacttccagggacttgcatcccgatctccccggwttcttcccttggggtgggctgcccgcatgcgcagtggcccgccagtgttggggaggggagcatgctcagtgtgtttaccggagttttgcgcatgctcacgtgaggcattcttcccataccagtcccagttttcctagaaggacatacaccaattaagctctgccattttgcctcttagtgtgcatggttgagccgactcacccaactcccgagatcttattgggaagctgatcaccagtttcaggtttttgtatctattgagagactgccgtcccttggcaccagctgtgaccaattagtattttagcgacacagttaacaactgcttgaccatcacgtgatggtcgccttcctgttgtgggtcggggagccctctcctgccctgctcatgcctgactagctatctactgtaacggacacttcctggttttctgaccattgggcactattgactgtaacccctccttgaaacatggttcccttcactctgcactttgttccccctccttatcctgaggcttttcttcggttcatcacctccagctcacttcctttaattttgccattccctggggttccgtgggccccctcctctctctcttccttatatatctgtgtccatacttacgtctctcaaataatatcactactccaggttgaatcacatctcccacacccaggtagctaactactcaccgggaacgccatggggcggccatgacggtctcaggcttaactcagctgagactctacttttcccccacgagttgtttgttctgctgttttcctgttccttgggaacctgggaagaacccaggacttgtccctctccttcccctctatgtccttctagtctgcctcttgtcagtccccactgccccaggccaggcaattccatgcccctggtcctttcattcgtgctcttctcctccctgtctcagcttccgaggtgacagcttacctgggtgacagcaccacacccatcacactgtgttgtgtcaacggcagtgatcgttttacttctccccatctagaccctgagctccttgtaggcaaggcttgtcttactttacctttgtgacctctgtgtctgttacagtgcctggcactaagtcggtaatttactgaatgaacgatgggcccactttgttgtgttcacctgtgccgagctgaggttcattgactcccactgcatccaggggataaactctgacttagtcttggagtggcagatacaagcgacacacacccgtcagcyggaaggctcttgtcctctttgtgaatcagaaccctgtttaggcttctaatcccacatcaaagcccatctcctccatgaaatactcagtttttctagcctgcactgatctcttccttccctgaactttcaatgtatttaatgtacagcattgttcacgctaccactgtattcgtcattgattgtttcatatttgcaaaatgtttctctccccagttcagttgtaggctccttgtaatccggcagcccatgccttatatgggctctatgcgcttacgtgggcctctatgaaccctcaaaatgtcttttgccaaataaaggccaagccagatggactgagccctgtttcttctccttggctgtggccttactatcttcctgcccctcgtaaacagctttgcccctgggagtttgaggctgcagtgagttatgatcgtgccactgccctgaggcctgggtgacagagcaagaccttgtctctaaaaaaattaaaataaaaaatttaaaaaaacaactttgccaccctacccatcacaccccacccgcctgacctgcttcacaggctcccgacggccactggcttccaccttccccatctttctcttcccgcctccatctttyaagctgcgaaccagcccctgttcctttcrctgtccrgctgtcaatgagcccagagtcccttagccacctagtgctttcttccmcctcctgctgtctcttggggtcttctggtgtctgattctgtcagcggggcaggtggcagtacctgttctagcattcaggccacttggggctgatccacgcattgtttatgttctagcctgcaggacagccaggtggatggccctgcagcgtgggagccttgcccacggagtgttgaatttctyaattgaaatgaatacacttaaattaaaccaaagttttgtagaagaaatcctggccaggcacggtggctcacgcctgtaatcccaacactttgggaggccgaggcgggtggatcacctgatgtcaggagtttaagaccagcctggccaacgtggtgaaatcccgtctctactaaaaatacaaaaaattagccaggcattgtggygggtgcttgtaatcccagctgcttgcggggctgaggcaggagaatcgcatgaacccgggaggcggaggttacaatgagctgagatcgttccattgcactccagtctgggcaacaagagcgaaactccgtctcaaaaaaaaaaagaaatcctgttggctttctgtgcagttttttgatgccattgtgacacagagaaactttatttcaggaactgcttatatcaacatcagaacttaaggaaatgtctgagtactactttgatgggaaagggaaagcctttcgaccaattattgtggcgctaatggcccgagcatgcaatattcatcataacaactcccggtgagctctttttttcattcctttcttgtttttatatttggsaagtctttcttcccggggttacttactgtttcatttcccatttaagaattagcatataccggctgggcatggtggctcatgcctataatcccagcattctgggagcctgaggcgggtggatcgtgagatcaggagtttgagaccagcctggccaacatggtgagaccccgtctctactaaaaatacaaaaaaaattagccgggcgtggtggcaggtgcctgtaatcccagctacttgggaggctgaggcaggagaatcgtttgaatctgggaggcggaggttgcagtgagccgagatcacgccattgcattccatcctgggaacagagcaagactccgtctcaaaaaaaccaaacaaaacaaaaaacatgggggatttttaaaacaaaactttggaggggattttaataaacgatagaaggtatatcttaagaaacagagcacgagggagaaactactacttactgatttttatattttcctttattaagcttttcagttgtccattaaatgttccctactagattacggggagttcttaacttgaggttcacgggagttgtgggatgtctgtaaacaacttgacattgtatgcaaaattttgtgtatatttggattttttggggaaggatttctatggcttacagtttattctcaaagggaagtagggccctgaaaagctcaggaccccgtgtttgttttctctctgaatcttgctaaccatggtgtctgggtagagaaagtaggaatccacacaacagtagactcagacttgacatgtccagaacacagagttgtggtggatcctgagacttgcccccagatcccccgtcagtgcacgactctgccccagctgctgtaccaggtatggttggtacctgttggccttcatttcttagcctcttcaaggattgccttggytacaaagagtcctctcaccttaggctgtgccccttcgggaggcagcccacatccagggactgatagatgaagggccattctacctgcacaccctagagggtgtttcaggctgttgattccagctcagcttctcctgctacccagtcctgtatcctctccccctccctcaggtgtcagtaatcccargggataatcccgaataaacatcctgtcctttaaacttcatctcagagtctgcctcctgcagaacctaacttgcaacagagctcagcaaaacccaagctcattttattaaagaacccagatcaaaaaagagctttatgggctgggcacagtggctcacgcctgtaatcccagcactttgggaggccaaggtgggtggatnnnnnnnnnnnnnnnnnnnncctttcttgtttttatatttgggaagtctttcttcccggggttacttactgtttcatttcccatttaagaattagcatataccggctgggcatggtggctcatgcctataatcccagcattctgggagcctgaggcgggtggatcgtgagatcaggagtttgagaccagcctggccaacatggtgagaccccgtctctactaaaaatacaaaaaaaattagccgggcgtggtggcaggtgcctgtaatcccagctacttgggaggctgaggcaggagaatcgtttgaatctgggaggcggaggttgcagtgagctgagatcacgccattgcactccagcctgggcgacagagcgagactcttgtcttaaaaaaaaaaaagtagcatgtacctaaaaattcactttgtgatgtttagattctgactttaagtcactaaagtcactcaggaatctagtctggcatcttttttttttttgagacggagtcttgctctgtcgcccaggctggagtgcagtggtgtgatctcggctcactggaagctctgcctcctgggttcacaccattctcctgcctcagcctcccaagtagctgggactacaggcgcctgccactgtgccccgctaattttttgtatttttagtagagacagggtttcaccgtgttagccaggatgtggtctcaaggtatgagccaccatgcccggctaattttttttttttttttgtatttttagtagagatggggtttcaccatgttggccaggctggtctcaaactcctgaactcatgtgatccacccaccttggcctcccaaagtgctgggattacaggcgtgagccactgtgcccagcccataaagctcttttttgatctgggttctttaataaaatgagcttgggttttgctgagctctgttgcaagttaggttctccaggaggcagactctgagatgaagtttaaaggacaggatgtttattcgggattatcccctgggattactgacacctgagggagggggagaggatacaggactgggtagcaggagaagctgagctggaatcaacagcctgaaacaccctctagggtgtgcaggtagaatggcccttcatctatcagtccctggatgtgggctgcctcccgaaggggcacagcctaaggtgagaggactctttgtagccaaggcaatccttgaagaggctaagaaatgaaggccaacaggtaccaaccatacctgatacagcagctggggcagagtcatgcactgacgggggatctgggggcatgtctcagaatccaccacaactctgttttctggacgtgtcaagtctgagttatctgttgcatggactcagtctcaaaaaaaaaaagtttttaaaataaattaatgaaatgtcttcacaattacatcatataatctattgatggaaattccagtagaccatgatgtactaatacatctccctagtgttgaacatttgtattatatttccccttctcagtagatatttaaggaatgcctaagatttgtcagcactgaatttaatgacgctgtaagaatgagtgtcagatattgcttcttagtggctcctctcctctgcccacagctttctctgccctgctgctggccctgccttgtccagtacatattgccatgcccaggtctggctgccactttagctgggcttttcaaagagctctcagtatatttgtagcaagcagtgaaatctctggcattgacctttaaccattgtcaggaccactttcactttaccggaaggcagagcagcaaaaacgctccctctgagccaaacttgaaataacatctcctgcagtccagagcagagttccgcagcctcgggactgttgaaattttgggccacattgttctttgttgggggtcactgggggctgccatgtgcattacaggatgtttagcagcatcgctgactctacctactagatgcccccgagttggtaacaatcaaaaatgcctccagatactgccaagtgtcccatggtcccacgcagcgcagattcgcccctggttgagaatcactggtctagagaatgtgtttatatttttaatttctctcttaatatgtaatacagttcattgctctcagaaataaacatgggaaggaaatttttttttttactgctttaagtactatcacccactgtccccataattggaagtttttctttttctttttcttttttttttttttttttgagatggagtctcgctctgttgcccaggctggagtgcaatggcacaatcccagctcactgcaacttccacctcctgggttcaagcaattctcctgcctcagcctcccaagtagctgggattacagatgcacgctaccacgcccagccaattttgtgtttttagtagagataggatttcgccatgttggccaggctggtctcgaacacctggcctcaggtgattcaccggccttggcctcccaaagtgctgggattacaggtgtgagccaccgcgcccagccaatttgaagttttttcagcctgccttatggaaactgtataaattgttagttgcagaaaacataggagaatataacaaaagccattgctagtttaaatagtaagttcactactgccctctccagggaatgtcagagctgcagccttattctccctataagtgattggagcagggcttaggaaagtcacagtgcagagacagcgtccggcatggggacaagtcacggttgtggcgtgggtttgggtggtacagtaccctagcaattctgctctccaagccccaacttcctgacaatacttgctttctgtggactcttctggatcgggcacttaaaggactaaatatgtaggtattatttccatgccacttaagaagaagggatgaggcttctggagagctgggccatttgtgattttgcttttgctgagaaaggcttaggacagtagggggaaatggcagctaaagattcaggagcagcaccatccatgttcagtgccaagagagcccctccagcctcagtggccccagatcagtgaacctgacattgaacctgacaggcttgcttgttggtgatgtcataatggagggatactgttttaaacctttgacaatcaaagtttaatggctcttaggaggcttatcagatgctgtgtttttttgtttttttgtttttttttttgcttctgaggtatgtattaaattggggatttttgctgggcacagtggctcacgcctgtaatcccagcactttgggaggctgaggcaggcgggtcacgaggtcaggagatcaagaccatcctggctaacacggtgaaaccctgtctctactaaaaatacaaaaaattagctgggcatggtggcacgcacctgtcgtcccagctattccggaggctggggcaagagaatcgcttgaacccgggaggcagaggttgcagtgagccgagatcacgccattgcattccatcctgggaacagagcaagactccgtctcaaaaaaaccaaacaaaacaaaaaacatgggggatttttaaaacaaaactttggaggggattttaataaacgatagaaggtatatcttaagaaacagagcacgagggagaaactactacttactgatttttatattttcctttattaagcttttcagttgtccattaaatgttccctactagattacggggagttcttaacttgaggttcacgggagttgtgggatggtctgtaaacaacttgacattgtatgcaaaattttgtgtatatttggattttttggggaaggatttctatggcttacagtttattctcaaagggaagtagggccctgaaaagctcaggacccnnnnnnnnnnnnnnnnnnnntggatcacctgaagtcaggaattcaagaccagcctggtcaacatggtgaaaccccatctctactaaaaatacaaacattagctggatgtggtggtgtgcacatgtaatccaagctacttgggaggctaaggcaggagaatggcttgaacccgggaggcagaggttgtagtgagccgagatcacaccattgcactccagcctgggcaataagagtgaaattccatctcaaaaaaaaaaaaaaaaaaggaatgagtagcactgtagacatgatttccaggctgagagcagttgaaagggtctagggtttagttctaaggctgctggtaagaggagccagcgtgacatcatattttaaaattatatgtaaagcaagatcaaaagctttcctcatgctgatttagtgtcgatagttaaattacagcaccttttatgtagttatacttcatttttcattgctttctgccgggtctgaggaattggaatgagcattaccttgtgcagatgttcagattcgatttttaaagaaaaagtcatatttcagaatccctctcccttttttcccctctaagatacaacctgatggtatttgaaaataagcatttggaataagtgcaacatttggttagtgtgtgtttaaatgaggatatgttttaggttccaaatggttatttcgccagtttgattttcttgaaatttagtttttaaaaattgccatagatgatggtggtaataatgattaaaatgaaatgggggacattccctctgaactgtaaaatttatatctgtgtcctgtcttcttgagcctacttatcctatagtttgtgttaaacttgggaaataaaagtttaaatttctaatgagaaggttaaatgtgagttggaagaaagttttacaaacatcttctgttggttactgaggttgtcatactaaacgtttaatttaagacattactacgcggggtgcggtggcttacgcctgtaatccacactttgggaggccaaggcaggcggatcacttgaggtcaggagttcgagaccaacctagccaacatggtgaaaccccatctctactaaaaatataaaatttagctgggtgtggtggtgtatgcctgtagtcccagctactcatggaggctgaagtgggagaatcacttgaacctgggaggcgaaggttgtgagccaatattgcaccactgcactccagcctgggtgacagagcragaccctgtctcaaaaacaaraaagacagtattaaaagccttgaacattgagacagttgagtctttaaaatacttttaaaaaatgcttctcacctatcttccctatccaccccaaaatttaattgtaaacttataaacttaaacacctgaccaagaacactgttataaagatgattcttcagcccaataagatcagccagacttctgatcgtttactgtttttttggctaatggtacaatttctacttcttcaatggggaattcataaaatgtagttgtggcagggtttctcatacatttgtaaatgtatagaaatggctgtgtggtgaagccagagtttttataccgtttctcttagagaaataacattctttatcctagatccgatgtccagttttcacaagctgattgctgagaaggttctaggcggcgtctgttaaaaagcattgctttctgttaattagacatgtgcaagccagccagcgcgccatagccttaattgcagaaatgatccacactgctagtctggttcacgatgacgttattgacgatgcaagttctcgaagaggaaaacacacagttaataagatctggggtgaaaagaaggtatggttttttggtttttttaaaatctctcttactgaatcacacrcttttcggaccgcatttgtttctcagatttgtctcattaaaaatatgcttgctcaaatgtaatgtggtcttctgaatttcaaaaaagtattcatgtcttgtccaaatacagatatttgataaataaataataaaaaataccatggaaaaataaacttagtatttctaatagaattcctttggttataaggaaagggattttcatgggtgtccaaaaaatgtatttcatgaggaatcatacgttttacttttgggcttagattacccagattcagtttaattttttaaacatttgtataattgagtgctgcatataaatgccaaagcaaacaaataaaactaataaaagaaaaaagaaacctcagagagatactgttctgccatgaaaattctgtcttttgaaatagaagttctgtaattgggtttggttcatatatgtatatattaaagcatatttctatattattagcattggkaatatgggaaacagggacttggtttgaggatgcatagatcctgggttgaaggatgagaataaagttgaacagatgagaatgaaaatgcacaggcatccatcgccatcaccacacacgtgctctacaaacaaaaagtttgtgcaggccaggcgcagtggctcatgcctgtaatcccagcactttgggaggctgaggtgggtggatcacctgaggtcaggagttcgagaccagcctggccaacaaggcaaaaccctgtcacyactaaaaaaacacaaaaattagccagygtacacctgtaatctcagctactcaggaggcttaggcaggagaatcgcttgaacctgggagagggaggttgcagtgagccaatatcacactactgcactccagcctgggcaacagagtgagactccatttcaaaaaaaaaaaaaaagtttgtgcaaacaactaccccaccctcacctccttttctctcatagatttatagtattcctggttcattcctatttaattctccttattaaaagaagagatatatgtatatacacacacacacacacacacacacacacacacacatacatatatatatgtttattgttatcttcacatgctggttttatttgaacataaatgactgttttgaaatcgagtcttgcaatttcatttatatgccttttatttcaaattttagattaaaaggttttacgtcctgttgactaaattctgtacatcagaatgttggccaaaaagcagatggcgtttagatttggagaggatgtgggtaactctatgacccatccctgccgtcagctgtatctgttttcaggcatagccagtcctaaagccttatgtggagccttgggcgggggaagaggatcaagagaacaaatgatggtctccgccttggctagcccctgtgtgtctgcctctgccactggggacctctttctgagggcaggtcaaggacacatgtgccgccttcacctgcctctttcagttctgacagccatctgcttagcacagggctacttgccagttcctacctgtttctgcctctgacccacaactgctatgttaccggtacaaaaccccccacacacagtgccccctcggtgagcccttgttaggcctggcctgggcttcctagcacttctttcctttaactcccacccctggccgtcacagtcctgtggcttccatgtcatatgctggacctttggtctctaggatctccccggccaggtgaagaaggaactaaaggccaaaggatcccgagccttgagctgctaatgatgtaggggctgggtcrgggaatgtaagtgggtacctatatatcataatttgtaaaatgactttataggcatatacttacatcaggatgtcttacataatatgtatattatataaagtggtgattaattggtaaacacaatgaacatcactgtttagatactgaagaacctaagacaataagtacctaaatagttatgttraaaattctgtgaactctagcctttatractaattactacagaatgtaacacttacrgcygggtgtggtggctcacgcctgtaatcctagcactttgggaggccgaggcagttggatcacttggggccaggagttcgagaccagcctggccaacatggtgaaaccccatctctagtaaaaatacaaaaatacctgggcgtggtggtgtacgcttgtagtcccagctaytcatgaggctgaggtggggggattgcttgaacccaggaggaagagtctgcagtgagccgaggtcatgccactgtactcaagcctgggcaacagagcaagactctttctcaaaaaaaaaaaaaagaatgtaatatatatctttaaatatgcaaattaatgtgatatatagggtgtatttggttatagcatataattcaactatttatgcagtagtttataactagttgctaatacagtgtagacatccatcacagtctaaagaagactggaaatatgttgattgcttagtgttcaatggaaaaacttttttttttttttgtctaggaatgaggggcagtgycacatagtacaaaaagcatttcacttggagccaaaattctttggtttaatttttattgaaaataacatgtatcgtgccatgctctggggtgtgctcagtactagctgagatgattcctagtctgagctcccactccactccaccctccccactgccctgggagcatagagactagagcatcactgactggtacgcaaggtgtgatggtcgcagcrtgcatgggtgttgtacacgcacaaaagggaggcatctgaccagactgagggatcggggggaacttcttagaggtggcatctgaaccaattatgcaaataagtccactcagtgaagaagggggcagaactttttgagcagaaggaacagtaagtggaaaggcacaaaggaagaatgaacatccagtgtagtgaaactgaaggcagctgcattttggtggggctggtgagtgaagctgctctccctctccaggcattgatttcttcaggtgtcaactggggagatggacatggtcatctctgagagccaatacagttcaagtactgtcccaaatctgtaaccgattattagaaactgggaagagtgacatggtcatctctgagagccagtccagttcaaacactgtcccaaatctgtaactgattattacgaactgggaagtgacatggtcatctctgagagccagtccagttcaaacactgttccaaatctgtaactgattgttacggactcctgttgaggaagaagaaggtaaaaaaccctgcatccaagatgagcccccacttccacgaagctcccttccagtcagtttcatcattggctctactgctctgatggatttttcagaacgttctgttttccccctgtctttttctaggctgttcttgctggagatttaattctttctgcagcatctatagctctggcacgaattggaaatacaactgttatatctattttaacccaagttattgaagatttggtgcgtggtacgttgattctgatttttcttctttgttattcaaccctggtgtttagccaggcaataaagccacctctcaaatgactcctttccttctttataggtgaatttcttcagctcgggtcaaaagaaaatgagaatgaaagatttgcacactaccttgagaagacattcaagaagaccgccagcctgatagccaacagttgtaaagcagtatgtacgttctgtctttcttcaagttaaagcctcatagctcttttttgggagctaattttcctagaaaatatttcggtgaagaatcttaaaatagtacccaaaaatcccaagaggttaatgaggaaaagaatgacatccccaaacaatagaggacttctgctgtgttttcatttttgccatcttcttttggtatgcaggcgttgacttttcatcttttcttcccaagaattcaatcaaaataagctttcccgcaccttccccaatctgattgccaaactgtatcattttgaacaatttatcataatttctctaatgattgatatcacacacactctttctgacacttcaccttttagaaatgaagtgctctgttctttaatataatatttactcaggaaaagatatctgttagattgtactagcattctatgaacttttttttgtttttttgttttttgtgtttttttgagacagagtcttttgctgtgtggcccaggctacaaagcagtggtgtgatcttggctcactacaacctccacctcccaggttcaggcaattctcctgcctcagcttccctagtagctgggaccacaggtgtgcgccatcacacccagctaatttttgtatttttcatagggatgggggtttgccatgttggcygggctggtctcaaactcctgccctcaagtgatccacccaccttggccctgcaaagtactgggattacaggcatgagccattgcacctggccaatacattgcacctggccaatccttctaatatttttacatgaaatataaacaagtcctatttcttcagagtacaaattgagtataagccataactgtttttccccttgctttctccctccctccgctgtgcatacacatgtatacattttttttttaatgagtaatacctttaatccgtagacaaatgtgtggtattcatcgttagtccaagaatgaaaagcagtctctccatagaattgtttatctgcccatctctaagcctgacagatacacagagacaaaacctggacaaatgacattcccatgtaattacagccacaaaataaggaagacctgtaagggtcgcatgtcaattgctgtcatgatagactcctaacataattaacaggtaaagagagcttttgctcagacctctcagatgaaaaagtctcttgctgttagtgtctctgttttgaaaagtgtcaagaaatgtataattgcaaggcagaaaagaatgaggacaatcttttcttcctaaaaagacctaatagaaactttaaggaatgtgaattatgtagaacatgctagccacagtctcgaccacttttgtctttttattaaaagggctattatgtttttatttccaagaaattatgtgggttttttttttaaagtgagatggaagaaagtatagacacgagatgctaaataagagaatagcctattttaagtgggtgctctaacacttttacagtaatcctttacatattatcatgcccttgatggcccaactctccctgaaggtcaggatccatcctcttaacacattagggtgccttaatattacttactaatatttatccttaagaggatgtgttaagtgaggctcattgataatttcacaatttgagactgcaaacttagaagcattagcatggtcaggcaaggtggctcacacctgtaatcccagcatttagggagactgaggcggaaggtttgcttgtgaccagaagttcaagaccaacctaggcaacatagcaagatccccatctctacttaaaaataatgtttaaaaaataaagtcttagaagcattagtagtagtgagactattggaattggaaacaccaagacttactgtctgcaccatgcagacatcctgcaggcacggggtggggcggcaccaaattggagctagcacagaaattcactcagtgatggaagcttacaaagggtccaaagaaatggacytgagtcatgatagagaggtttccttgtggtcactgttttctgtttaagaagccaaagataatgcacaggaattcttttataaagatatgcacctcattcttcaaagattagcagctgaacgaacagtgaacatgttaacgtggctggacccttawtaaaaatgaaatgtttcatgctgcccactagggggcatgctggcatcgtcccagcactacctccttttcatgtggtttattcctaaactccacagctcttagaataataaagcaaaatgatagtgtgagctatttgaataaaagtttctatatttaagtgcctatgggtggaaatattccagaggtgttatggattcaaaatggctatttttacgtactcttggtatttaaaatgcaaagccatgcgagctccaaataaatgcatgcaaagcaaattagacacaccaaaaagaggggaggaggagaactgaaagagcagaattattacagaagaagaactaatgggattgcaaaatgtattgagaattggagggaaacttacaagctgcattctactaaggataccatttcttcatctcccttcctttttttagtgaaaataatattaaaatctaagagagggctgtctagggggattgttttgtgattgactgatattaaaatagaatccattttaggccgggcacggtggctcacacctgtaatcctaacactttaggaggccgaggcgagtggatcactttagtccaggatttcaagaccagcctggccaacatggcaaaaccccgtctgtactaaaaatacaaaaattagccgggcgtggtggtgcacgcctgtaatgccagctacttgggaagctgaggcaggagaaccgcttgaacccgggaggtggaggttgcagtgagccaagatcactccactgcattccagcctgggcaatagagcgagagtctctcaaaaaaaaaaamacaaaccagaattcatgttattatcaaaagatgacttatttatttacatacttactcacttgcaaaatacattttgtactcatgcaaaatacattttgtagcttactaataaagacagtggcttgtttcccaggaaatctggtggaaatgagacctgagaggtcagagggcctgtccagttgttgttaagccagacagtagctgagttgagacttgaacccagagctgggtatggtaatcctgccttgtttctctctctctctctctctttttttttttttttctgaatttctattttctccagggctgcttgtggcctggaattaatgggctctcttcctattacttgattttcaaagcctcagagtaccactacagaattgcatattgtgggtcacattagcagaacactctttttttttttttttaattcatttttttgagatggagtctcgctctgttgcccaggctggagcgcagtggcatgatctcagctcactgcaacctccacctcccaggttcaagtgattctcccacctcagcctcccgagtagctgggattacaggtgcacaccaccacatgccacacctggcctyttttttttttacaatattcatatctatctataggcctcattcaratcttgccagttgtgaactgttataacgaaagggaaaacatatttttctgttccagcatccagtccaggatttcacgttgcattttgctgtcatgactctgtagtctcttgtcatctagaacagtctttctttgcctctcattaccttggtatttggaagagtgcaggccagttatgttgttgagcctctcagtcgggcttctctgatacttctcaagattcgatccaggttatgaatatttggcaggaataccacaagagcggtgctgtcctcagctcctcataccaggaggcgcgtgctgtcttgtctgtcccrttactggtgatgcatgcctggatcgcttgattaggatactgtcgggccgggcacagtggctcaygcctgtaatcccagcactttggaaggccgaggtgggcagattacctgaggtcaagagttcaagaccagcctggccaacatggtaaaaccccatctctactaaaattataaaaaattagctgggcatggtggcgggcacctgtaatctcagcactttgggaggccgaggcrggtagatcacctgaggtcaagagtttgacaagcgtggccaacatagtgaaaccatgtctctactaaaaatacaaaaattagccgggcgtagtggcaggcgcctataatcccagctactctggaggctgatacaggagaattgcttgaatccgggaggcggaggttgcagtgagccgagattgcaccattgcactcaagcctgggcaacaagagtgaaactccatctcaaaaaaaaaagatactgtctgccaggtttcttcaatctaaaattactattttaacctattttgggcaaagtattttcagattatgtaaatattattctgatggttgtcaaatggctgtttttctattttcatcatttcttctatatcactcttctacaagaaagttggtatcctattttttttgttattattatttcattctcaaaagagctgaagagttggtattccattgtaaggaagctcttaactgtatgggctcttggattcttattttattctgtatctttttttttttttttttttttttgagccagggtatcactctgtcacccacgctggagtgcagtggtgcaatctcagctcactgcaacctccacctcccgggctcaggtgatcctcccacctcagcctcctgagtagctgggattacatgcggctgccaccatacccggatgacttttttgtatttttagtagagacggggttttgccattttgcccaggctggtctcaaactcctggcctcaagtgatcgcccacctcggcctcccaaagtgctgggattataggcgtgagtcaccgtgcccagccatcttattttattctgtagattataacactgtcattattttaatactcaattatccaacgtatggccagtaggggaggccctttaacctggctctgtgtcctccatcattttttcagcaccccatttctggcakgagatattcagccctgttattcactgttctccaaggagcccacattccttttggtggaaaatggtgttaagaaaccagaatttgagtactgggtgtcatcgtttctagacccactcaatggacagagctaggaaatacatgtatgtattatatgtaatgtaggtagatacgtgtatatctttctgtacccatccatacttattcaaaaccacgaggtatcaaacagatagttccaaatccatctaacaccacaggatttgtggtttattccaggattccatctttccatatttgtaacccccttcccaaacagtgagagacctggctcctcttctccgcggtgtatttatttgcacaatctgagaatataccataggagtttacaaattcatgactcatatctctgtgaaaaacaaacccagtagctagaattcagtatttatcattccttttgtcttgggcctgaggataatagaatcaaagcactgttcaaaagttacctttctctacgtatcagtgtggttgtgttattatttggaatatattaacccatttatgcctagtgttccattattggaatgctaagcttgtggagttatttctatcctactgctcaaggtcattaccaaggtctgatttttcacaaaacaaatttgcaacctccagcataaatgggttaatagttggttcctttttttttttttttttttttttgagacggagtcttgctctttcgcccaggccggagtgcagtggcactatctcagctcactgcaagctctgcctcccgggttcacgccattctcctgcctcagcctcccgagtagctgggactacaggtgcccgctaccacgcccggctaattttttgtatttttagtagagatggggtttcatggtgttagccaggatggtctcgatctcctgacctcgtgatccgcccgcctcggcctcccaaagtgctgggattacaggtgtgagccaccgcgcccagcctagttggattcatttttattccactttagggattccctctcattcttgctgatttcgtgttttggttttgagcgttttgttattgttgctgttgttttgaatgtttgaaacaacgtggctgggcacagtgtctcatgcctgtaatcctagcactttgggaggccaaggcagatggattgcttgagcccaggagtttgagaccagcctgggcaacatggcgaaacctctgtctacaaggaatacaaaaattagctgggtgtggtagtgcacacctgaagtcccagctacctgggaggctgaggtgggaggatcacctgagccctgggaggtcgaggctgcagtgagctgtgatcacaccactgcactccagcctggcaacagagtgagacyctgtctaaaaaaataataataataaaaaaaataaaagacattaatgtrgctccaaaagtcagaactatacaatacagtaactctcccttttgccctgttttcttcccctacccccttgtaggtaagcagtctcrttcacttctggttcctccttcctgggtttcgtttagcacaaacaggcagacacaagtatgctatcttcccttctttctcacagcaagaagtagtaccctagactactctgctttccttttgcatttcttcagttaacaatttattaggaaaatgattccacattggtttgtaggatcttcctcatttttaaaaccactgtatcagggctgggcttgtaatcccagcactttgggaggctgaggcggccgaatcacgaggtcaggagttcgagaccagcctggccaacatggtgaaaccccttctccactaaaaatacaaaaattagctgggcgtggtggcacacacctgtaatcccagcactttgggaggccaaagcaggcggatcacttgagaccagagttcaaggccaggccggccaacatggtggaaccccatctctactaaaagtacaaaaattagccaggtatggtggtgggtgcctgtaatcccagctactcgggaggctgaggcacaagaatagcttgaacccgggaggtggaggttgtagtgagccaagatcacgtcactgcactccagcatgggcgacaaagtgagactccatctcaaaaaaattaataaataaataatttaaaaatttttttaaaagcctctgtatcagatcccattatgtggacatagcatggtttattcagccaatcttctatacatgggcatttaggtttccagttttacaattacaaacactactgcaagggctgatcgtgcataaacctatttttgtgttgtgagaggagtgcctgcagggtgaatttaggggtaattgcacatgtggttttgttaggcaccaccagatttccctctgttgggtctgtaccagtatgtgtttccaccagcagcttttcrgaacctcttttcccacagccttactaactaaatgtgccattacacgcttgagtttttgccagtccagtagaggagaatgtattgcagtggagttttaatttacatctctcctttctgagtgaggtggaacatttttcagatgcttaagggccatttatttatttgtttatttatcggagtctcactctgtcacccaggctggagtgcagtggcacgatctcggctcactgcaacctccgcctcccaggttcaagcaattctcctgcctcagcctcccaagtagctgggattacaggcgtgagccactgcgcccagcccttcccagtctcgttgagacgtggcttgtaaggatgtgatgcaaggtgtgaaccttccccagaaagaagtgcatacgcacagcacagcctggctgcagcatctgcttcaaacaaaacagtyagccgagctccactttctttgacttaatcattcttcatgctccacccatttccggaaagatgtgaggcatccctctgatgctgagcgcaagtctgtgcacctctttgccttcttgtatgttgtgctatgttgcgtccaatttgtggcagttgttttctgttttcctgctacagatctaggcagtactgacctgggatggggaagcaggactctctggcatggtctttatgctaccccagggaaatctgggatagttgaaatctgagcagtaatgtcccttcgccatgtgtcaggcagaagctgcccactaaataagctctgttcagcatgtgtgggcacagaggggacagtgcagacagactgcagctttatgcttacttggacacattccttgacctcttggaggttctattttgttgcccagcatagaagcagcactcctgtgttgaagtgatgaagagaacagtgtctggagccagaccatgtggatgaaattcaggttccagcgtgttggagccatgtaatgcctggtaccgtctgtgtctcagtttctcgaacttcataagtgacttaagatgtgagaactctcagaacagtgcctagcacatagtggacgctcagaaattgttagcttttatcatcaccaaccacataatccatatttgtgggatattgtgaggtttaactcaaatcatacaaagtgttcatcatatgtgctccacacattttaatccattaaaatgttcactaacagatttttaggccgggcacggtggctcacgcctgtaatcccagcactttgggaggctgaggcaggcrgatcacctgaggtcaggagttcgagaccagcctgaaaccccgtctctactaaaaatacaaaaattagctgggcgtggtggcatacggaggttgaggcaggagaatcgcttgaacttgggaggtggagattacagtgagcccagatcgtgccgctgcactctagcctgggtgacagagagactccgtctccaaaaaaagaaatagatttttagaaaatctttcacttttcaggaagaaagcttatagtctctgtggctctgtgttgaggaaacagcattaatctcactacaggagactgcttcactatcagttatttctacgtggaaatatcttgattcccagtatcattctgtcctgagcccagcacatcccaggctgcccaaatcttgccatgctctcctttgagccaagctgatcttagcttctctcgaaagtttctgaattgtcccccatatggtctcccagactcttcagttgaaaaaaggagccctccctgacagcccaggggtcggtgcctgctcatgggaaggtggttgctgttgaaagcagttatgagcttactgttcactcaactcagtggccacctgaccctttatggtgcatgcaattttaccatgtacttatggccaagcactacatagtcaacagacctcattaagttgtcaaaaagcattctcaggctgaggacgttaggcaacctggctttagttggcagaggtgcgtggacactgccaaggctcctatttctggttccagtggatgaggtggaggaggattatttgtaataatagcaaacagccaggtgcggtggctcacacctgataatctcaacgctttgggaggtggaggtgggaggatcacgagcccaggagtttgaggccagcctagacaacatggtgagactccatctctatgaaaaaattaaaaatyagctgggtgtggttgcgcgtgcctgtagtcccagctactcaggagactgaggcggaaggaacccttgagcccaggagttcaaggttacagtgagctatgatcgcaccactgtaccccagcctgggcaacagagtgagaccctatttctaaaaagagataataatagcaaacacacattgagttctaaccaggtgccaggcagtatactgagggcttaaatgcagcatcatgtctgtttctcacagcaaccctacaaggtaagtgcttgtgatttctacattgtacagatgagcaagagagattcagtaacatgccgaggtcttgtagagggcacaaatgcagccccacagtctcacagcagagcccgcagcactgcaccacactgacgcctgagcaaagttcactccctgactggagagccacagaggcacgaccgaaggtcaggggacagggtttcctagcatccgcgagccttacagaaaggcaactgtgcagtgctccagctggctttctcatggagagtcaacagagacatttcccctccagtagaacacagaccgtctctcccctcccccttgttggttttacccaggctttgttttctgaaaatgtggctgggcctgcttaacatgcttagcagggcactgggaaatgcacttcagtggccggtgccagctagctttttggagttttaaaaagactttcagaagtcttatttctcccccattgaaaggagggaaaagggtttttatacagttacttcttttgagagaaatgtggaaacagtgggaccagtgaagttccttccgataatgaaagagcgatatctgtgtctgaagcaggaggcttgagatgatttttatggacacaccaagaaataactgcattcagaaacaggtgaaattcccaacgatgatgaaaagaaaggactacagatgggaaaattgtgtgtgattacattagtatctcttcctgaaatgagggatacattgatagagatgattaaagccaacagtaatcgggctagcttgccgagtgctagaagtcagtatttcacagatgggggtccgtttcttttgcatgtcaagaaggtttacttagcatgttaccagcagaactagtccagttgtagctcagtttttcctaagcagtgggaaaggctgcttatcctgtctgaaagcaggggttggagaaggagaattttcttagaatttaacaacacaatctgagactgaaattcttgactggaaatgcggttttgtacatgcttggtgtccctctgatgtcagcatctcctgagtgtgtataatctagccccgctgcctcctattttaaggaattccttcagccaggggtcagctgctttgttgctgcctggaagcagcttatctcagaatgctctttctgtttcaggtctctgttctaggatgtcccgacccagtggtgcatgagatcgcctatcagtacggaaaaaatgtaggaatagcttttcaggttagtatgctttttatttgtaagaatggtggcgtagtgatacagtcagcattctcccctagtgtgtaatcgtmaaaatagtaagaacgatggcagcagtgttggcatggcggtgctccttacatcccatttttccttttgccagctaatagatgatgtattggacttcacctcgtgttctgaccagatgggcaaaccaacatcagctgatctgaagctcgggttagccactggtcctgtcctgtttgcctgtcagcaggtaggttttacaaactccctttgacacatcactgcatagccccacagaactgatgtcccgcggcacagctgatgggaagattgcataaaggaatagatgggaaggcattcagataagagatcacaggtctgcatttgatcctggctgagtgagatgttggggctggtcatttcaccttgctaagactgtttccttatctgtraaattgagaagatcacctttctcccagggtggttgtgaggattagctaagatcctatttgagatctttgtgtcttgtggtgtgccataggcatttgaggtagcatcgtgattatttccatatattttggccactggcaaagtgaacggtttctaagtcttgattataggactggactttggtggtcctcagagccccttaaaaggcataggaagcatcaagggcctccaagcataagaaattctccggttctagaagtttaatgagactctgctgctctgagagaggctttagaacctcggccattgcctcaaaatgtcaggaagtcagtggagtgcagtagacccacatagttccttctttctccggattgagggactgagtcccccttaatgtgaatgaaaggcttaggaagcttcaaagatgttccctcgactgacaaagcagacattctcacagcctcctccagaccctgccacatggcttgtggctgtactgaatgttacttgaaataagtgagacattagctggtgttggaacatctcgttaatagattttcatcttagtagtatttaatttgttatgttgcaaagcagtaagatgttcatcaccgtgccatgaaattcaacattagctctttggtgtaaaattatagtaacttttggtctttcagagattttgcctctattctgtcttcacgtttacaaaggtcagtcatgtcctccataaaattcagtgattccactgtgatacagaaaccacggcccttgcttttggtgggtttctgattggagagaggaaaggtcatctttcacccactatctagcatagccattggcagcatgattcttcccaggggaggctgacgttctgggtggctggaccaggctactttggcagcttgctaaggctatgaatggagatgttggggtactcggtaggaacacccrccctcattattacaaggcttccatcctctcaaactttggaggctgaggtaagaagtgaaaggtatgctgtaaataggtcctctctcccaatgaggcttacttgccagcccaaaatcaaagagtataatacatgtgcccagttttgacaaaaatttataaaacctccttttgtacattaaggcaagagtgaggaacatttgagccatgtaggtgttatgctggggattagaaaaatgaggcactggctaccagtaacctatataactgcgaacattacttctcagatacttgttagtaaacatgagtgaaggaaagcaagatggactgagtgtgctgaaatccagctagcttggtaaagattcctttacctaggctcagattatcaggataaaaggaaaaagcctttttccctggagaagtctatgagaaagttttggttgctctatttgtaaaaatcttcaaattgttaagtacttgttatgaaccccaggatactaagttaccggttgagtcctacttaaaccttaaggtgactgggtgagaggaggctggcctcttcggactgtgtttcactctgaatatatttcagaagaaactaacttactttcccctacacacacaaaggagtaatggctatctctgctttcatatatagtgggggaaaggggaaatggacctctgcatagtatctgtcagtaatctacaagagactgaaaaatgctggttaggcggtggctcatgcctgtaatcccagcactttgggaggctgaggcagttggattatgaggtcaggagttcaagaccagcctgaccaatatggtggaaaccccgtctctactaaaaatacaaaaattagccgggcctggtggtgcatgcctgtaatcccagctactcgggaggccaaggaaggagaatccttgaacctgggaggcagaggttgcagtgagccragactgcactccagcctgggtgacagagtgagactccgtctcaaaaaaaaaaaaaaaaaaaaaaaaaaaaaggctggttaaaaaaagcaagcaaaaggaaaaaaaaagattactgtacccgaagccatggttttatgtgtgctttgctgggaaatcccagtcatgaggcacctactcrtgctcaccagacagcagtgttctcatctgcccataaggcagtgagttgaaaaggcacattgcagcctcagaaaagggaacacagaatggagtccaagcaggaagtgactctggacaggactcatttcaaaagtagactgatgtttctgtcttgtggcacatgggccagaagttagccaagtatgtatttataagttgccttctaataaaacagcaaggttaggctcttttgtggaatacactgtaaaacaagagattcttagcaagaaatgtgtcaaaagatatatgggactaagattaattcaggtaaaaacaagttccaaaaataacrtaagaatatgcaatatctccacttaatgaaaatgtgtttttagtttacaaaggattctttcatacattatctctaatctcacaactcctctttgtggtagatattatggtgtttattctgcaagtaagaaactgatgcccaaacctcgccaaaattaaacatctggtaaatggcacagcagggaactgaacaagtctaagaccagtattcattttattacatcatacatagtgttattgccactggtaatgctgagaagttagtagctatgataccacacaggccttcccacagagcaggtaactaacccacctgggcactgacgatactcaaagaatcatctctgtgtcatgtctttgctattgtaaacaacatacctacttggtggagtagttctaagacgtctgtaatcctttccctttggtaggtgagttttgtttgctgatgagatggtctttgaacttttccatttgtgaacactggaccaggacaagcattcttgggaaaccaccttttcctttttaatttggtgtggtgggttgtcttggagtttactccagccagcacttgacagaaactccctgtcttttggaattcctttatttttaacatctctcttaaggggtttcctgataacagttggttcagaggatttaaaaagagttttggggatttctggagaagtcccaggggatgacagcgtcctcccatgtacgtatgtgtacatattctctttaagaataaaaacctcatgttaattggattttgaaagcttcagaaacaaaatggaagtgttttactttctctggtgaaacttttttaattttcaaatatcttttttaaaaaaaccaaatctttcctttcttctgcttctcttccttatttgataagtcactagacccaaacgtcagttgtagccacgtttccaaatgccatcaccagcccctgcaccagctgcacaggccttatgctatcgtggtgactagttggtgccttagtgttacccagtttcgtttgggtagactcatactsatcaccttagcagtttagtttatggatgggtttcacagagttacaacccgatttatccacaggtggttttcctactcttaaaaacagcacctgagcaaacagaatttttatttgtcactaaatctgcaggcaactgttcttcctgctgtgtttctcttttcttttccacatacacattaaggggactggggagtgcccggggaagagtttgatattttgcatattaaaattgcacacatgacatgtttggaaggaaggatgtagtcactcaatgcaaatatttttttcaaattttgctttctcaatgctttttatagtaaaagcatcagtgaaaacacccaatcagcatatcttaccacacttgctggtactgtagaaaaagcttatacatcataaacaaggtaatgtcaccagatgcctacgagagaatcacatcagtgtcaacgataaaaccttctagatatccagtattggtatgtggtattaaaaaactaaaacaggctgtgtgtagtggctcacgtccataatcccagcactctgggaggcccaggcgagaggatcacttgaggccaggagtttgacaccagcctaggcaacaaggcaagaccccatctctataaaaaatttaaaaattggccaggcacggtggctcacgcctgtaatcccactttgggaggcactttgggaggccgaggtgggcagatcacgaggttaggagatcaagaccatcctggctacggtaaaactccatctctactaaaaatacaaaaaattagctgggcgtggtggcttgcgcctgtagtcccaagtactcgggaggctgaggcagaggaatcatttgaacccgggaggcggaggttgcagtcagccaagatcgtgccactgcactccagcctggatgacagagcgaaactccatctcaaaaaaaaaaaaaaaaaattaaaaaattagccaggtgcgtgcctgtagtcccagctactcgggaggctgaggcagaggatcacttgaacctataggagtttgaggctgcagtgagctacgattgcaccactgcactccagcctgggcaacagaacaagtctcataacaaaactaaaacctacttgatttggcttttttaccgtagaagttgatttgggctttcctgatttctagtagcttgttttcttcttaaaagacccagtaactaaaggaaattactggttttcataagaactaaccagttgctggctctataaattctgtaaacacattagcagtctccacatgtttagagctttgttctgacacatattttggtctgaaaaaattatttctttgtctgtgatcacttggctgcggcttttctatgtatgccctattttttcttctaggattactaataccatggtcatggttacaggacaacttatttcatccttcaggttcactgccagggaaaaactggcagctgctgtaagcactgacgtggccaaaatcaaacacatcttacctcttccgtggagccatagactgttagagctcaagggcttccagtcatgaagatgagaagcctaagaccccaggggctaaggaagtcactcggctgtggcagctggtagccaaaccaagactagagttcggatctaggaagtgaagtgatttggtgtcctggcttttgtattctgttaatggtgacacttctaaatagttgctaagtattgtagaatatcgattttaccttcagttccttttttacctattttttctctctcttcttgctatcatcttaattcaggtcttttttataacctactctagtaacctgtttgttctgtctacctctgactcttaattccatggttctcaaccttggcggcacattaaaaataccagggtgggcgggaggaggttgaaaatcttggtgcccaggctaaaccccaagccagtataaccaaagtctctgggaacaggatctaggcaactgtatttatacctccccaggccaggcgcggtggctcacacctgtaatcccagcacttggggaggctgaggtggacagatcacctgaggtcaggagtttgagaccagcctggccaatatggcaaaaccctgtctctactaacagtacaaaattagccgggtgtggtggcgcacacctgtagtcccagctactcaggaggctgaggcagagaattgcttgaacccgggaggcagaggttgtggtgagccgaggtcgtgccactgcaccactccagcctgtgtgatggagcaagactccatcacaggagggggggaaaaacaacaaaaaaacaaaaaacactccccagctgatcccagtatgcagtcaatgtcatgcaccgctgctcagatccactctacacactgcttaaggcagagctctgcacataatgccctctgctcagaaacctcagtagctttcagttggtaatcaatttagaacttagagtagaatgcctaattcccatcctcatcctaggccagtgactctcaaaatgttggcagagaccagagatactggtgtcacctgttagatggtggcatctgttagaaatgcatgccaaggctccatccctactcaatcagaaactgggggagaggccccacaagcagtacaggtgatcctgatacgatttaaagtttaacaaccatgttgttttttattttttatttgagacggagtttcactcgttgtccaaggtagagtgcaatggcgcaatctcggctcactgcaacctccacctccccaggttcaagcaattctcttgcctcagcctcccgagtagctgggattacaggcgtgcaccatcatgcccggctaattttttgtatttttagtagaaacggagtttcaccatgttggccaggctagtctcaaactcctgacctcaggtgatccgcccacctcggcctcccagagtgctgggattacaggcgtgtgccaccacgcctggccagaaccatgttgttttaaagatgtactttattcctcctgcctctcttaactcagtgttggactaggataaaacatcagaataaacaaggactaatgtcttctcctcccrtacaccaccacagtgcctaggcatagacggtggatgtctcttagctcagcttttgttgccacagtttactgctcccccacatcatctagacacttagtttcatttttgttgtttcttgttatttcctattgttacaaactagtgttagaacacttgtttctcccaagagaaataaatagattttctcagattttctctctttttttgttagttcccagaaatgaatgctatgatcatgcgacggttcagtttgcctggagatgtagacagagctcgacagtatgtactacaggtaagactgtttttttaaaaaaaasgcagcagcaggaacaaygtggcaaaatcctttaatccaaaaatgtaacattaactaaacattaaattatagatacaagactgtttggtcaactcttgatgtgacaaaaactgagaagggaaaactcatttttctgattttttattttcatttctcttctagactacttacgaaatgttttgttttaactggtcttaggtaaggcacagacattaatatctkttaaaaggtacctaagtgattgtggtgaactgttagtgttgaaacccagtggtgtggaaccagccttccctgtgtccatcaacagaatcactgggcccccagtcacccagcctcggctccagcctcatccatgtccccatccatgaccccatccgggctgctgctggactgctgcaatagtctactcataattgggctttcctagtccatcctacctgttataaaagtgtgactaaagaaatgatcattgaaaacaataaaccaacacaggcaaactatacatttatataaatgtttttcttttaaagggagaaccatttaaccccattcaggggctagtggcttgctttaaatatattgccacgtatcttcagaacttttctgtggaagccagatctctctgcatgacttgagttttggtgactgactcctgtgagaatgagccatttccaagttcactgtcatttgcagccaacagatctactggatgagtcggagtgagcaaaaaatcattacaaagcaagtgtggcatgagatctgtacttagtgtagtacctgaaagacttccaaataattaccttccagattcttaaaaaatttaaaaagcaaccccaacccctaaaaggttatttttctctcttaactgactatactgttaagccccattattcactacgggttactgccttttttggagaatggtttaaacgtactattaaaaactatggcagggagctggagctgataaagaagtcaatattccctgggagaggttctggcttcagaaataatggtattattgaaagctagagtgggaagtggaactgaaaagagggaagttaatagtagcacctatggaaaatagcaaagttccagcaatcctagccagaaacacatttagaggaaacaaaaatccacgggaatgttctctgaacaaattctccaaaattctagctccctgttcacccacagagcttctaggcctattccctcattaaatatgaatagacaactcagggttacaaataagttgactaaagcttgctgaacaaaagagtgggaccaaaataacagggggaaaaaaaaacaggaaaaacgtaaataggaggatccaaaaagataccacattcacaaaacagtacaggatcatactttttaaatgagtaagagcaagttctaagaaactgaaaatgactgaagaacaaactccaaagaagggctgcaatgtgaaattgtggaaatcctcccaagtgtaaaacagaaagggggaaatagtgaaaaataacaagagctacaaggaccagtaccatcatgtaacaagtatttcaggaagaaaataaacaaaaaagtggtcacttatgctagaaaatggtgtcaaaactggctcaatgaatagcaaagatactggatactagaaggcagtggaggaaggtcttccaartgaggatgaaacattttaaacctaggatccattaaatccgaaggcaaaagaaagtcaccacacatcaggactaaaatgttgacttcccataaacactattttattttatttttattttattattttattttattgtatttttcttagactgagtcttgctctgttgccaggctcaagttgcagtggcacaatcttggctcactgcaacctccgcctcccgggttcaagtgattctcctgcctcagcctcccgagtagctgggactacaggcacccgccaccacgcccggctgatttttgtatttttagtggagacggggtttcaccatgttggccattatggtctcgatcttgacgtcgtgatccgcccgcctcggcctcccaaagtgctgggaatacaggcgtgagccaccgcgctcagtccccatgaacactttctgggtaggttatttgcagatgtacttcaggaaaacgtgtggaaaacactgagagaaggcaggcttctgtacaaaaaggaacagcaaactaaaatatgtcatgttttgagcaactggtatagaaaatcagatgtatttcaaccacaatgttaggaatattccatttctaaatgtcagaggggtccgggcgcagtggctcacacctgtaatcgcagcattttgggaggccaaggtgggtggatcacttgaggtcaggagtttgagaccagcctggccaacatggtgaaaccccgtctctactaaaaatacaaacattagccaggcgtggtagtgcacgcctataatcctagctacttaggaggctgaggcacgagaatcccttgagcctgggaggcagaggttgcagtgagccaagatcacgccactgcattccagcctgggcgacagagcaagattccatctcaaaaaaaatttaaaaaaaataaataaatgtcagagggatcatgagccatggagaaggaaatagaattatagtatatgacttgattctgcaataaatatttttacatcatagaaatgatactttattagtatttggcttttagaaagaaccaataytttaaaacatggttatagaataggatgtaaatatctatagtctaacaaacagtatagttaaaggaaaggacargagctcatagaagataaaatctgaagttgatgctacctaacagaagtaatcaacaaaacaactaaagacagcagtgtgatgatgaggcggcacattgtgggtgggctaaaccctcatcttaacaaaaaggtaacaggtaataactaaaattggtaatcaagaaataaaaactaggctgggcacggtggctcacacctgtaatcccagcactttgggaggccaaggcaggcagatcacttgaggccaggagttcgagaccagcctggccaacatgacaaaaccccatctctactaaaaatacaaaaattagccgggcatggtggcacgcgcctgtagtcccagctacttgggaggctgaggcaggacaatcgcttgagcccgggaggtgaaggttgcagtgagccaagatcatgtcatgcactctagcttgggtgacagagtgagaccctgtctcaaaaaaaaagaaaaaagaaaaaaaaaactattggataaagtgagtgcctttggaagaaaggaagctgattttcatcataaaccctctgtactttcattttgttatgtctttattctttattttttaagtaagttttacttgtgttttttttacatttaaaaatgttgtataaagatactttgtacatagaacttctgagaaattctaataagtaaaaattaggggaaaacgaatgactatgtaatattgatgagctagttgctttgcatgctaatagaataaaaatttgcttcaatatgagaaaaaggcctaaaggaagttagcactatgagtcgggaaaagaacattagagatgtagtttgactgttaactgtaatcctcagctcatctgatctcaaaactatgtgttcatttattatagcaggaagttaaaacgctgattcagtcagtgacaggcatctgttctgttttgttctgtatcttatagagtgatggtgtgcaacaaacaacctacctcgcccagcagtactgccatgaagcaataagagagatcagtaaacttcgaccatccccagaaagagatgccctcattcagctttcagaaattgtactcacaagagataaatgacaactctttctgttctttctggcagctatcttaccagactgtgcctaaagaattttgtggaatacactttgtttgyttcatgtgcagataaccaaaaatcattttaaaagatatcaaacttattgatgggcaatttatttttttttattgcaaaagktttttcagaaaactttttaaatgtaattaataaaccacctgaatctgtcattctagtcctataaattataatcaaggtatcttgatggttatatgtggtattgtttacactgttaatatccacatgtaaggccattacacaaataaataaccaatgttaaaattcaaatggtttgtcttgatttaccgtaggagtaaaggtcagaaaaatgtgaagtctgcattgaagtccacatgagttatattttaacagtatccaaaatttcatataggagaatggtttattataaaagactgtacataaaatttagacaacaggttatatacaaattaagagaacaatccacttgaaaaatggaaagtagaaggtagctagctgatcactaatgatactttgtttgtttaaaattaacaaaggcaaaatgcatatgaaatagtcacattgatttggtagcaataatggtctttaattttcagaaataactgttttgcactagtcttaccattcactatgctgttataagtctgtagcatccagtacataactgtaatttgaattccaaacaaatcctcaataacacagaaacccacacttgagtgctctactttaatatcctaagcaatagagaattatacacaagacaagaagagaaaacatccctcagccctcccttcaattaagaggagacacacaaagtgcatgtgttgcattttgattatgtcaaaagacaatccaagtctgttggttaggtaaatctctgttcactgattaatacatgacccaccttctttcccaattattttattttaaaattctaatgttgctagtgccaggtaatggattaaagagtgcctactcacaaatcaactgtatccacttttacaatatgtaaaaggtacttttaacttcctttcattgaaccagtgtacaacagttcactgtacaactgaaggactgacatggcaatccttaagaattttacctacagaatgaatgcacacaatttgacacattttcttagtttcaaaagattatttaaaaaaggaattcagtagattgacttgtaaataaccattgcagattttgaatctgcaaaaatccgtcacattgctgttgggacagattaagataaggctaaaatttttttccaagttaacatattgagaaaatagaatcataattctgcaataaatcattatcttttattttttttaaagcaaatcagtgaaggaaaggacaaaaacctttggttcacttatgtatttatgaatggaaaaagtttataatgcaaatttcactcattaaaaaacttaggtacaaattacaacattacagataattctctttttgcttgtttcacatggagaccttggagactcaattcacgttaagacacctaagtacgagtcctccaggtaaatattacacaaatgggaagcatcttgaatttttaagtatattkcaatacataaatttttatgcatgctttaaacaaacagtattttttttaaatgagagaatctaacaaaaaaagtctgaccagcaccagcatttaaattttctgattttaatattagtctgacatagcgttagtaaccatgctgcactgaaacatgtaatggtacaatctgaatcatgattcgttaaatattataccccacttcccccagaatatttaggctggtcataaagttaaaaatgtgtaagtaagtacataagcataatcagttatggacagcttcttgtataaattgctattcagcaatacataaactgcctcaaagatttatgcttacaggtagacattcaatttaccaataaaacagcatgttctgaaaatatgggcacattttaaaacatattaagacagttctgttaaccataatagtcccacagtatgactgagtaataagaatctacttcaaaagaaaaaaaaaaattaatcagtatagtgcatgattgattcaacatagttcccagggaacagaccagtcactcgattgcagactccttcataccagccatcatcattcttctttataacataaatgattgcaccctccataaatgacagctcatcatccttgtcttttgtataatcatatattgcaacaactatggaaaaaacagttgaaatatcacatgagtgcactatatccaaaatttacttgaattttaagacaaagacaattaaatatatagcacagcaaaactatttttatgaagatttcttaatttttgtatctatcaatataagtaggtcagtggccaaccatgtacttaaatcattggcttaatcttagagccaaatgacaatctgattagactgaatacatcaataggttctgtcaatcactttaagaaagctctctgaattttagaatttattagatgtttcaattcattcaaataccaagtgcctatcatatgcaaagcaccggcttttcaaaataattatcaggcaaagaaagctgcatagccattcagtaaaccaggtaacaatccaagctatctaatttgaaaaaacacagttactggaaggtaaatcacatcctactcattcaaggacccatgctaatttaagggactgtccccagatttttttttaaagaatatttacttactttaaaggattttaattaatacttagagaactttgcaattctgtggtgtctgtaattttttcagttcaagatacaggttgagtaacccttatctgaaatgcctgggatcagaactgctttggatttgggattttcagattttggaattttacatatgcgtaatgagacatcttggagatgggacccaagtctaaacacaaaactcatttttgtttcacatacaccttatacacatagtctgaaggtaattttatttttcccttgggaacactgaataaactgtgtcatgtgcctgcattttgattgtgacccatcacgtgaggtcaggtgtggaattttccacttgcggcatcatgttggaactcattttggattttggagcattttgaatttgggactttcagatagggatgcttagcctatattcacttcctttgcaaactgctatggaaagagaaagtaatccaaaatgtataaaatggcccatggacaaatccaaaccacgcaatttttgtaaataaaggtttattgcaatatggccacatctacttactcatgtattgtctatgtctgcttttacgctacaatagcaggactgagtagttgtgacagagactgtatagccagcaaagtttaaaatatttactatctggctttataccaaacaaagtgtgctcacccctagttcttgggaatatactttttaatcctcctctactatcaaatatattacccaatatatcattccaaatttgtcaacttatataaatatggtcccattttcacagttaattggcttcaccaagtaagaaaatatgggtaaaaacacaattcaaggtcactcaagtttatcatcctcgtaagtaacaacagctctctatttgaaggtatatgggaatctcaagtagaatattcaagactttcttaacaatatgtaaattacttactgtttaaaaatataaggccacgctcggctcatgccggtaatcccagcacagggaggctgagatgggcggatcacttgaggtcaggagttcaagaccagcctggccaacatggcaaaaccccatctctactaaaaatacaaaagttagctgggcgtggtggcgggcacctgtaatcccagctacttaagaggctgaggcaggagaattgctggaacctgggaggcggaagttgcagtgagccgagattgcaccactgcactccagcctgggagacagagcaagactccatctcaaaaaataaaaaaatataaaaggaaaacaaatttacttttgccacatatccaaaacttgggcaggaaagaatgctgctggtctcaagagctacatctactagcttaaagtccgttaacccagtaaagtcaatagaaggaaatatatttcaaaggcaaccaaaagtgttcaactaaatcacaagcatttttcagaactctatagaaatacagattttatttttaattgattcccacttctgcaaaaagaaatacagattttaaaatagcacagaactggatgaaaaaataaaaactagaaacaggatttgtttcttccccacctatatttcttaatagataattatagtgaatatcgggtactataggtaaattagactttagagtagttcataatttcatgaaatacaatcctgataatttctcttgtgttttataaaatcacctaattgaaaccttaattgaggcttttctcatgatagtactaatatatttttaaagaccgatgctcctccacttacatacaatggggttatgtcccaataaacccactgtttagtggaaaatattgtaaattgaaagtacattttcaacttgtattttttttacttataacaggtttatccagacaaagctccatcataagttgagaagcatactgaatgcatatcatttttgtaccatcataaagttgaaaagatcctaaagtgaaccatcataaatcagggaccgtccatatttagatatgaaaggtaatcaatagagcttgacagaacttttaaaatctttactaattacatataactccatttttgtgccttagctgtttcatctataaaatgccgtccagcaagttaatcttcagctgaacgcatatgtagtttgaaagcaaatctaacactgcaacttttatttaaaatacaaagaaagaatccccctgtacactgggaataatacaaaacttaggaagtaaggtttaagtaaatcatcttggttggtaaggcagtttaaaaggctgagaaacattggattagatgttctttatagttctaaatttctacaattaggttattttccttcacatcaactcaatgactgtaccttacctttctcaatataattcttgggggcccaagcaggatccccatctgcatatggatcattatactgaactactgcagcctcctcatcttcataatccactggtggtggtggtgggggaggtggagagtcatcaaacatgggaatgtcatctggtggaggtggtggcggtggagttggactatcagcaactaaaaagattcatatgattgatttgaatcaaaaataagtctagatggaaacttataagttaacagaatttaagaaagctctaacttaagtacagcatgcactataataaaacatgcaatgattagaaataaaagcttggtgtgttaaagtttatgctactcaagaatcatttaaaaataacaaaatgagctaaaaataagggtatctggaagtactacaaattaatgaatgcagggtgttaggagacaatgtctctttttataaggattataggagtagtttccttattccaaggttcagatcgggacaaatgttaacaatctaaaataaatctatgtcacttttgtcatttggactgcagtaatgatatgagtaacattacgttaatggtttgatcactcttcactctgctcattcatgcccctgattttggcttgaaacagctttggttccctaaaaattcagtctcctgtggacagatttttgtttctttgttgattattgtttgttttgatgaagagaaaagtaaagttggtagtattaggtctgcttctgtgtgcagattttctactctgttatttacattttacaagttgaaaaaatggaaaaagaatccccaaccagtagaaaatctaattgagtatttttaaaaaggtttatattcataattagttttttaatgtagaaagcaagctaaaattttgcattattgctagtaaaacataagcacgggatgagggaaagcctagatcctaaagattcgattttctaagaatacatcaacaattaagatttaaacataaagtgttgaagatgtaattaaaaaaaacaaacaaaaaggaacttacagtaaacaaaacaataaaaatgactcatacctcaaactctagatggtcgtggtcagtatatatgtgtgtgctttacacagtcaaaggtgtaaacagggaaatgggaaaatgtcaggctagagctctgttcaatgaactagtataatatcaggtaaaaatgctcctaaaatttaaagaattcaaagctggaacccaattaatgcttaacttaaatttctgatcaataaatttctttaaaagttcaaaagacatatgaaaatgttttcatacaaattgatacaggaattacataattcctgcaggggagaagttcataatacaaacatactaaatcaaatgccaatttctggggctatttacgtgatcaaagaaatcagccataatctatctgtcatataggtttaaacgtttagtctaccctccttggaataatgtgctgaatatacaaccaagggctccaggtttaaaatatttgcagataatgaccctatttccataaccacttcaatgctgtgatttctattttatcctctcgagggatgaaagggctattagaaaacaaaccctatatggtaatgctcactataacacctatcaaacgggtctacaattaatttttctgcctcattcctagatccattttatctttgcccataacttcctctataaaactttttaatattattgaggagaggaaaatgggtacagacccctcctgacatcaaacagccatagttcatatccttaatttggcttaatgtgtaaattatgtatgttggtaccttgcatttactcttgatttatcacattagtttaatgttttcacgaaattgtctttatgtccaactgctgtaaatctacatgtcttatcttcaaattatggcgaaggaagtcttggttaatctaattctctgcataatcataaagagatgtaaacacactgctgacttttttagaggctcatatcttaaactgaaatacttattaataggctgctacatgcattcattatcacccactttgagtgtcataagaaactggg

SEQ ID NO: 95269 - DNA, 40859 bp, Homo sapiens
aacccactggaaggaaccaactctggacacaccttgagtacacgaatttgaaattacactgaggtgatcatgccactgcactgtagcttgggtgacagagacaccatgtctcaaaaatctacccagagttgggaaccactgatctaaaccattaaaatttttatttctgtcactaatgaagaattttctcattgttttgatattgctggggaagaaaaacttttaccctcttaggatgagttcttgggggcctgcaaattaaataaacaagagacgtggccaggtgcctaactcttttgagaggccagggtggaaagatcgcttgagcccaggagtttgagaccagcttgggcaacataaacgggaccccaatctctacggaaaaaaaaaaaaaaaacaaaacataggggaagtggtggggcatgagtacttacgggaaaacaaatgacttagaagatatgaaatgagctcttatgaaaatagatggaagataaaattttgttacaatgtctgttcacgtgtggtacccatttattgtctcaggataaaagtcagtctttcctggttgctcccgggaaggggattttttagctcttttgagagcccaggcttttagacagctaagggatttcaaaaacaagtgattataaaattaaagatgctctcatttagaaaaaaaatacaggtctaaaatataacacagttatggattagaactgttatgcagctcagtattagaataaagcaaaggttttccaggagtggtattatgccccggaaagaaagcaagacagagcaggaccacatgggtaccatctgtacaagttctacaaatgtgtctgacaggtgccccatcccttccagctctaacatttcatgactctaacactaaatctttttttttttttttttttaaattttgagatggagtcttgctctgtcgcccaggctggaatgcagtggtgcaatctcggcttactgcaacctctgcctcctgggttcaaaggattctcctacctcagcctcccgagtaggtgggactacaggcacgtgccaccatgcctggctaattttttgtatttttggtagagatggggtttcactttattagccaggatggtctcgatcacctgacctcactgagaggtgaagccagctggacttctgggtcgggtggggacttggagaacttttctgtcttacaagaggattgtaaaatgcaccaatcagcactctgtagctaggattgtaaaacgcaccaattggcactctagctagctagaggtttgtaaaatgcaccaatcagctctctgtggctagctagagatttgtaaaatggaccaatcagtgctctgtaaaatggaccaatcagcactctgtaaaatgggccamtcagcaggacatgggtgggggacaaataagggaataacagctggctgccaccccccaaccccagcccccagccagcagcagcaacccgcttgggtccccttccatgctgtggaagctttgttctttcgctcttcacgataataaatcttgctgctgctcactctttgggtccatgccacctttgagagctgtaacactcactgcaaaggtccacagcttcattcttgaaatcagcaagaccacgaacccactggaaggaacaaactctggacacatcgtgatccacctgtcttggcctcccaaagtgctgggattacaggcgtgagccaccgtgcccggccaagagtaaatcttaaaagttcacttaggataagcaacagtttagcgtctagatcatgataaccttaatgtcagaaaaatactagaaacttcaacttacaaaatttggtagacaaggtatgagagagtaatctacaggatgtgcttttgtgaaacctacaccagattttgttaatagcaaaagcaggccgggcgcggtggctcacgcctgtaatcccagcactttgggaggccgaggcgggtggatcatgaggtcaggagatcgagaccatcctggctaacacggtgaaaccccgtctctactaaaaatacaaaaaaaattagccggacgtggtggcgggcgcctgtagtcccagctactcgggaggctgaggcaggagaatggcatgaacccagggggcagagcttgcagtgagccgagattgcgccactgcactcccgcctggtgacagagcaagactccgtctcaaaaaaaaaaacaaaaaacaaaaaacaaaaaacagcaaaagcaaaggcgaagaagaaattaacttgtattatttctgccacctaggttatcttctcccacttcctttccccttctatttatttccgtattcatgcatggatttagcatatttacagactatcagttagtgcttgctatggtttgaatgtgtcccctaaattttttgtgttggaacttaatcatcaaattcatatattgattggaggtgaggcctttgggaagtaattaggattagataaaagttctcagtgtgggtcccccatgatgtgactggtggcttcgtaagaaaagagaaacctgagttgacacacaggtcttgctctctggccatgtgatgccttctaccaggttatgtcaagagggccatcaccagatgccagcctcttgatcttggacttcctagcctccagaactaaaagaaataaattcattttctttacaaattactcagtctgtggtgttctgttatagcaatgcaaaatggagtaagtgttatcttggccctatcctgaaggaactttaatccagagcagtggttctcaaaagtgtggtctcagaccagcagagttgcatcatctgaaatgttttagaaatgtaaactctcagatcccactccagatctactgaatcagaaacttcagggatggggcccaacaatcttgttgcactctaacgtttaagaaccactgacccagagacacaattacgatagttttcattctatgatagagcctctactgggacctgtgatatgtaagagaagcacccagtgtgttcagaggtgcagaggtaagaaacgatgatataactggtgtatagttccagcatgaatagaatggtagatgtggggagtagaaataaagctggaagaggcatatagggccaaccaatttaggacagaacctggatgccatacgatggaatatgggctttatctgaacatttattcagaatcaccaaaggactctaagcaggagtaacttaccagatttgtgttttcaaaagatcattatggtgctacggcaaagtataggaggataccagttacatagttactgcattaatccattcaacaagcaaaataaaacatttatagaggctctaatatgtgttaggtgctgattacacttactgctataaatatgacataaccagtatagatatgacatctttttttgtaaaagcaaaaattttatattgaattttcccatttcaatgtttatagtagaacttaatgaatggctgaaagggaaagcctgtatgtgctatcataaaattcagattgcattttctacctgcaaggaggtgcaaacaaaattacagttaaaatagttttgagaattttttttttctgtaaaactatactagggttgggctagatctgtaagactagtaactgccaggtgctgtggcatgcacctgtagttccagttactcaggaggctgacacaggattgcttgagcccaggagttcacgatcacccttccaaagaaaaaaaaagactcgtacaaatgttgattctggcctaatatgctgctcctgtccaaaaagcccacctatttgctttgaaatcagaaagactggctgggcacggtggctcacacctgtaatcccagcactttgggaggccgaggcagctggatcacttgaggccaggagttctgagaccagcctggccaacatggtgaaactaaagagaatacaaaaattagccaggtattgtggtgcaagcctgtagtcccagctactcgggaggctgaggcatgagaattgcttgagcctgggaggtggacgttgcagtgagttatgattgcaccactgcacttcagcctgggcaacagagtgagactgtctcaaaaaaaagaaaaaaaaaagatttagatttgtatctgactctaccacttactggggcaagttagttaacctggtgacaataatacctctaaattgttgtcaagcatattaaaagattaaaaggaacaacatagtgcttgcctcagttacgtattaaacgtttggtttatccttcattctcctagtttccaaatctgacgagacatcattgtttattaacattttctagcatatttagtcactcactacattatctaaggagtcttgtaaaacctctcattccacatacatggtctccatcataactcagacacaggaatctaccaccttcagctagaactgttgataaagttgtaattttcctccctgcatatttgtgtttatcctagtctatcctaggtacttcctaatgaatgatttctcttctcaaaaatataatcactatttgtaagccatagaattaggtctgcgttaactctgttacttaaatttttttcagtatgtcttttccttagttaagcctctgcttacatcgtttccactgactagaatttacttaccgcttctctatgttttacttttaagtctggcagaaatctccttaccactctcaaattgctcctttctttgaactgccattagtctattagagtaataagtgcattatttaacgtgtactgttcttaccaccaaaaccagatcagaacctttgaaagcaaaggactgtctccttgtatccctgatgtttaaaaattattttgtgaatcaaaggcacgtggcaaattgttactggaatcctattagacatacagtattgtatattacataacacgttccttcaagttgtaagatcttaatgatgtaagtataaagagatgtggatggagatgctaaacttgtgaattttttttttttttagacggagtctcactctgttgcccaggctggagagcagtggcccgatctcggctcactgcaacctctggcacccaggttcaaacgattctcctgcctccgcctccctagtaattgggattacaggtgtgcaccaccacgcccggctgattcttgtatttttagtagagaggggatttcaccatgtttgccaggctggtctcgaactcctgacctcagatgatccaccggcctcgccctccctaagtgctgcgattacaggcgtgaaccaccacgcccgggttaaacttgtgaatttaacatgttgcagcctcacatgagaacacggtattcaacaaatgcaatggaacgaaactatggctggggtacagagcacgtatttttgccatgtggtcacaactatgtggtcatagctgctaggatgatgtacgcaaactgctcacattaaagcaaaagtacttacgtaatacaaggggtttaatagtgcaacaatatttcttagcaacatttctgaggggcatatcaagttattatcgctaacgttaycatatcaggaaatgacggttaacaatgcaagaaacttttgggaaatgctatttagtgtttgagtccgcaagacatactcgtaccctgagcattcgcagttgctgctccaccacccattctctcactgctcacccacgtgcttctggacacttgcttaccaaagtactagtttgcatcacgtgacacgactagcaggccccctccgctcatgtatgacatcccaaagatgcctgattattttcccttctttagggaaaggtggtcccaatcaccaacaaaacagagaaagagaacgagaattatctctagtggttttgcctgctaatcttctttttccctgaaagaacaccctcacggcacggcgttttccttaacggtcaggcgttttcccgggcagcttacctgctcggcctgggtctttctggacagcaggcgctggrggtgcgcgtcactgtccgccgccgtgtccgcggctgcgccagacagtgtagaacctgcggcctcgatgtycttctcccgtgccytattgtgggctcggctcccggcggggcgccaggctggccaccgggcagccatctgctctgcccttcgtmcccactttgggccctttcccggggttctggggcaagtttctgtccttgccaccgcytcctcctctgcctccggtggctccaaaataccaaacacgtccttgttcgtgcccctgactgtgaaacctcagggccccagcgccgacggcgacgtcggggccgagctaacccggcctctggayaagagtgagtgcgggaactactgagggcggcagagggtggtgtctgctgggccgaggctggttgggaggaagctacatccccttcccctggggatccgaggtcccatcgagtgttgtcatcgtgcctctcagtgtctgcctccttcgctggtgtgtgagcccctcaaacggcttaggactgtatctgattaattcttaacgcctcgtcccagaagcggccttttcccttttactgccctgctctctgaatggtttagacactcatgtgttgggaagatttgacttttttgagttgttaggtggacgcccgctctttcttgcattctttgtttctctcccacccccgaatgggatgtggcagtgaaaagccagcggagactccttttaggattctttrtcattgaggaggcgccgactcataccacgctgttaggctgtgtggtggttgccaagaggaaccagactcagatccagatcccctcttaagaaacgtaacggtatcgtgggggaggacacgtgtatggaaagtgaactgtaatacaaggtagaacatgacaaggtctagaacaaggtagggtgtccccggctccagagagaaaagaagaggtagcatcagttagtggcagcgggctttgctcagcaaaacttaagtttggatggattcgttgacagagaggcatgtgaatgttttcaaggtgagtttcgggatgattagggaggtaagggagtttcctctgaccatatgaaactgggagattgaggaaatgctatccagaattgtctccaggaataggaggaraaatgtctcacttcaacaagcgacattggtgcctcctattgtaaatctaaaatatagactacaatatgtttttcagagcagaagtacagtactttcactaaacatgtgatggaactcacagtatatgttattctttgacatattcttccagtgttaagcaaggcctttcactttacttggtgctgggagactgtctttattttctgctgttataacataatacctgagactgagtaatttataaacaatagaggtgtatttgactcatggttctgagccgggatctgatgagggcctttggctgcatcatcacatggtggaaggtggaaaggcaaatgagcctgtgagacagagaaagggggctgaacttatccttttttcctgtgataactgactcctgtgataatggcattaatccactcacaaaggcaaactcctcatgtcctaatcacctcttaaaggttccacctctcaactgttaaaatagcaattaaatttcaatatgagtcttggagaagacattcaaaccatagcagagaatgtgttattttaataatgtaattatactattatttatttttaaattrtaaaaatacataaaatttactcttttaarcttttttttagtttttttttctttacttttttttttttagagacagggtcttgctctgttacccaagctggagtatagtggtatgatcatagctcactgtaacctccaactcccagactcaagcaatcctcctggctcagccttctaagtagctaggaatacaggcgtgcatcaccatgcctggataattttttaattttttgtagagatggggtcttgctatgttgcccaggctggtctcaaacttctgggctccagggatcctcctgccatggcctcccaaagccctgagattacagacctgagccactgcacccagccagtcttaattgtttttaagcacatagttcactagcgttaagtatattgacattgtcgcgaaatagatgagaactttttcatcttgcagagttgaaactcaaacaatagtttacccattaaagaacaattttccattattttatattatttgaaggcataaggtaatttggatgagataatttgccttattgtattcaaatattgataaattcttattttctgcagctattccaattcacctgaaaatgtaaatgtctttgctgcttcctgtaagaagatagaataaagacatgggtttgtcagcactagattttcttctggtggagaatccttagatacttcattgggtctgtgtgccaggtgatttttcatctcctttgactgggattggtccagatgttgaatttactagaatgatttttcagcatggcaggaggggctacagaagatggtgcattactacactctgatatagccatgtggttaaggtgtcagatttccacttagcttagcaatcaggacaagaagctgtcacttctcaatctcttttgcctactcataacccaaaaagttgaggtacttaaaggctttgtcctgcgtcaccttgctgccttattctgtgctgtctatggggtgtctcattctctctctcccctcactaattcagtattcctctcagatctttgtctctaccctggacctctctccttcaccctggacctatatatctcgctgcctaccaggtgtctccacttgtctttcttacacacacctcaccttagcatgtcaagacaacttaccttcccctcagcctgctcctgcaggtgctcaggtcaaaacctggtagtctttgttcttccatccctcacccctacatctaacaatcagagaaagcccagttaatgagtcttgttgattctacctcataaatgttggattcattcatttccctcattctccactgcaaccagcttagtctaaattgccagcttccatcttttgactggactgcacatatagccccttatgtgtctcctcatatgcctttgatcccttcattctattctctacctgcagtcagaatgttcttttaaaaagactaggctgggcgcagtgtctcgtgcctgcaatcccagcactttgggaggcccaggagggtggatcgcttgagcccaggagctcaagacgagcttgggcaacatggcaaaactccatctctacaaaaaatacagaaattagccaggcatgatggtgtgtgcctgtagttccagctacttgggaggctgaggtgggagggttgcttgagcttgggtagtagtagaggttgcagtgagccgagattgcaccaccacactccagcctgggtgacaagagtgagaccctgtctcaaataaaaaaagaaagatacaattttaatttacatactagaaagctcaccctttaaaagtgtataattcactgggttttagtgtatttgcaggattgtacaatcatcaccataatttcattttagaacatttttatcaccctaaaaagaaacctgatatctgttagcaagtcactctctagttccccagtccccagtgtctttttttttttttttagctccagataaccactaatccacattctgtctgttgatttgcctgttttgtgtatttcatatttatagtgtcatatagtattggtcttttgtaactggtttcttttacttagcataatgagaaatttcacattttggaagcattttaatttgagtaaagcagcatgaatcttatataacaccgtagtattagtcacagaaaataggttaattctaaataaatgtgatctgtctttagtttgtatcgagtttataggtcagcagaattttcccaagcaatgatggcatgtgcctttttccaatcttttatttgtcattggtttttctacccttgataccaagaaactgttggccaggtgcagtggctcacgcctgtaatcccagcactttgggaggctgaggctggcagatcacctgaggtcaggagttcgagaccggcctgaccaacatggagaaaccctgtctctactaaaaatacaaaattagtcgggcatggtgcatggtgatgcatgcctgtaatcccagctacttgggaggctgaggcaggagaatctcttgagcccgaaaggcggaggttgcagtgagctgagatcgcgccattgccytccagcctgggcaacaagagtgaaacactgtctccaagaaaaaaagaaactgttgttcctacccggcacaaagtaacagagacccagaaatctgcctgtgatctgaaatataaatacacacacacacacacacacacacacacacacacactgtgtgtgtatgtgtatctcatatttaattgtgggcagatctagtgattctgaaatttcctcattctgtcaaacagttttattagtggaatgctttgttcaggcttgatttcttcaatgagtgttgtgtgtgttggactgtgtgaaaatgtggttggcacatttgtgaaaggtaaaaatacaggtcacttggcctttctgaatttcatgggtaaaggctgtgtcctcattgtggcttctcctcctagaaatacatagtgtgtgactgagtcagtaaaatgtttattgaataatgctgtagtattttaacatatacaaccataatacaatctcagcttgattagtttaaaatacttttacctctaagattattgattcatagtggcatgtyatctcccaatagcatagacatttctctgccgtcacccttgacagtcatctaacccttgcttgagtaattccattggcaaggagctctcacttttcactgttctaattgttaggaagttcttgtataaattccactgaaatctgctcccactgactttagttatgccatctagcacaaaacaagtgtaatcttttatccctgaaatcatcatcctcaaacttaacatcagcgtggcttccttaagcatgaggatctggtccttgctatattggttgtctttctggatgtgttttagctgctcactgtttggatgtgcagaatcgttataagtgaatgacagtgtggctctctacctataagtggcctggtgaaggcttgaggctgcctctcatcccagagtgcattgctcattcctctatggtataacagggtgctgcattatttgactcgatcatttttctctttttttttttttttgagacggagactcgctctgtctcctaggctggagtgcagtgggcccatctcggctcactgcaagctccgcctcccgggttcatgccattctcctgcctcagcctcctgggtagctgggactacaggcgcccaayaacaggcccagctaatttttgtatttttagtagagacggggtttcaccatgttagccaggatggtctctatctcctgacctcgtgatccgcccacctcagcctcccaaagtgctgggattacaggcgtgagccaccgtgcccggccaactcgatcatttttcttaacactcccatcgcatatgaattcataaagaaggatcgactaaaaccttctagttcttgcaacactcattagactgctgcctttagtgttattgcttcaagtttcttttgctttttttcagcatttatctaagataaggaaacgttaaattttgacatctctcttctagatgaagtaaagaaggtcttagacaaattttacaagaggaaagaaattcagaaactgggtgctgattatggacttgatggtaaggcccaaaacatcttyatagaggtaytttattacctcttacggtacagcttggtcaggactgtacgacccctcatgtgacctggctkttgtagtctggagacacgtccctgctctttgcttctggctgagtgggagactggcgaggctcacctggtgagccatactgcacggcagaggagctgcagctgcggccttccttcatgctgtgctaggacttcagttttagcccagatcataataaaccagctgtactgccaaaaaaaaaaaaaaaaaaagaaaaaaaaagactctttgatgagtttggtgtggtgtgtctgtgtgctttttaaaatgagaactacaccttacatcttttcattttgtgtttctacagctcgtctcttccaccaagctttcataagctttagaaattatattatgcagtctcattccctggatgtggacattcacattgttttgaatgatatttgcttcggtgcaggcaagtgtttagagactttttaaaatcctattgaacataccttctatttcttctcatacttcatgctcatttctctagaagggcttatttggtttagagtgggtctggtaacatcctctgtaaataattcagtgctttcacaggatgacttctaggttgtttgcttttatattgggtccctgagctggttattacatcacccatatgtcttagactggaggaagactggggcccagtgaaataagctctcacacaagttggaattagtgcatagcagattccatctgtttttgccactggcttccttctccctcatatcaggacaaagttcttgctataaaagaaaaaaaaaaagtcaaaatatcatagtttcattcccacaggcagtttggctttggttatgtatttgactcttagacctgtaccttgtgcccagcactgaggatacaacgcagaatgggacatgccccagcctcctctcagagccactaagatgtggagaattcttgctgaggaacaaacacatgtttttgcctgtctgtggttttcgaagtttaaaaaatgtttgcgccttcatctctgtaatgtacatgtctaggttctttatttttaatttaacttttgccaatgctaatctttgcctgtttgtactaaaggagtaggacgtggtggttgctagccaatttcctgaaaatataaattaaaaggaaaaagtaagacaaaacaggatcccagaaaaggataaggcctgtaacctcaggacttttctacttttttttttcttttcttcctttttttttttttttttttttttttgkgacacggtctyactctgtcacccaggctctggagtgcagtggctcagtctcagctcagtgtgtagcctcaacctcctgggctcaagccatccttccaggtcagctttccaaagtggtgggattgttgacgtgagctactgtgcccagagaggacttttctttttaccctggcagtgcccccgcaacttagcttgttaagaaaaaagatttcactaaatttagttacgaattttatgtagattgcacatgttaatacagtgttttattttccagctcatgcggatgatttattcccatttttcttgagacatgccaaacaaatatttcctgtgttggactgtaaggatgatctacgtaaaatcagtgacttaagaataccacctaactggttagtttctccatttgtggatttgaaattttcagtttctaatcttggatgattcgtggtcattatttttttttattgtattctagataacaaattataaggagtctggattaggttgttttcctaaaataaaaagaggcagttaactcttttaggcarttcactggtatcttaccttgatccggattgagtgtggttttaggttttattagggcagatctagaatagccctgacttaaggatgtygtccttaagtgtaagctatggccttcctggtgttttagctgagcgcctgggtgttaatgagttctttccaccatggctggaactgcaacatcacctagcacttgagacgtctttgagactttccactgaaacccttggtaggctgctcattcctagaccctgccgattcttaccttgtacatggttagcccagcccttggccaggaattcgcagggaacccycacacagacttctgggctctccttctatgcacccttctcttccacagtctattcttcacattttagctgctgaagcagctctgaacttaatctctgctgctcgcttcagtgggactgtcatattctgcttgggttccacctccctatgccttgctggggtgcagtacggctcatcccaagtgttcttttctttcaaggattgcagtcctgcactgccttgtggcccatgtccccacacatttattgcatgtattttgccccactttgtacttgatttttttttttgtttgtttgtttttgagagagagtctcactctgtcacccaggctggagtgcagtggtgcgttctcggctcactgcaacctgcacctcacaggttcaagtgattctcctgcctcagcctcctgagtagctgggattacaggcgtgtgctaccacacctggttaatttttgtatttttaatagatacgggggctcaccatgttggccaggctggtctcgarctcctgacctcaagtgatcctcctgccttgacctcccaaagtgctgggattacaggcgtgagccaccatgcctcgcctgtacttgtttttagtgggagggcaagtctagtgccagttattccactatggccagaggtagaagactctgttattatatttgtgtatgttggaattcaggggcctgggaatgtttgcctttagagttatgtgtttagagctgtgggaatgatgtgaacatagtatggaactgatagcagcttaaatttatttttagtaaccgctgagaaaaagagatttgtacaatgggaaaaatttccaagacattaatttgcatttgggtttttctgtcctctagttagtaaatgctattcttggaaaccagtcattattttaatgtggatatgaaacccattgtttagtttttcaaagacttgatcttgtgaacattaagaggatatttcatttggaatttgtttcatttgctgtctttgccaggatggattttgaggttaatggattaagctgtttacctactcatgttttaggtacccagatgctagagccatgcagcggaagataatatttcattcaggccccacaaacagtggaaagacttatcacgcaatccagaaatacttctcagcaaagtctggagtgtattgtggccctctaaaattactggcacatgagatcttcgaaaagagtaatgctgctgtcagtatattaccaaatatttgctcatttttttcttaattttcttttttggtgggagtgggaaaagatgtttgtagtaatttactgttaacaagaaattaccatatttcattgtgtctaagaggctgtcaattgtaagatgtaccattattttatatacagttaagaaagaaaaagatgctaccaactgactctgacatgctatcaattcttttttttttttttttttgagatggagtctcgctttgtcrcccaggctggagtgcagtggtgcgatcttggctcactgcaagctccgcctctcgggttcatgccattctcttgcctcagcctccccagtagctgggactacaggcgcccaccaccacgcctggctaattttttgtatttttagtagagacggggtttcaccatgttagccaggatggtctcaatctcctgacctcgtgatctgcccgtctcggcctcccaaagtgctgggattacaggcgtgagccaccgcgcccagctctatcaattcttaagatgcatcttgatttcagagatacaaaaacatgaaaacatgtgccagtacagtgaatgaaatacaatattgaagaacattttacatatgtagagaaatgcagaaagtaacatacaaataagcttgaacctattacaccacctcatcatatctttacattttatcatacttgcttcacttacttttttaagaaataaaatattgttgctactctcaaaactctgtagtcctttgccccatcagagttaagcactactctatgatatttaatttaccttttatagattagacctctgatgctatcagctagagctaatgataaagactgaagctaccttttcaaaactgaaaggactgaagccctgtagtctgaggcatcattttcactaaatgggctacattttggttcattgttttattatgactttataatgtgagttyaaccagttttggtaggtaatttgcattctctttttttttttctgaacagtttgagcaatttacatacataatacctctttatctgtaaatacttgagaatatgtttcctcagaacagacttttacgtaaccacaggatatttgtctgaagcaggacatttaatattgatagattactcttacttaatacacaatctatattcaaattttatcaattgtccaattacaccccatcctccacccctccagggttcttttcagggtcttacactgtatttagttgtcatatctctagtttccattaatcttggacagttcctcagtcttcctttgtctttcataacctgtacattttggaagactataggtcagttgtgttgtgaactgtctctcagtttggatgtgtctggtgtttccccatgattagattcaggctattatgatgaccagccatcccagtttgcctggacttctccagatttagcaccaagagtcctccattctggggaacccattagtcctagacaaaccagaatggttgatcaccctgatacagcattaatgttggtccctctcagggaattataataggaggtctttacattcttaaattgtatttataatgttcttcttgaatatagaaacaactcattttaatgaagtcaaatagttcagagatgtacaaagttaaaatgtgaaactgctgcagtgtctcatgcttttgttacctgaggatttagctgatttgagatgtttccaggtttacccaagttgtgtaagagagtggctcttattttactttattttttataaaagggaaaaaagcattgggaatttttttttttttttttttgagacagtcttgctctgtctccaggctggagtgcagtggcatgatctcggctcactgaacctccatctctcagttcaagtgattcccctgcctcagcctcccgagtagctgggaccacaggtgtgcaacaccactcccagctactttttctgtttttggtagagatgggatttcatcatgttggccaggatggtctctatctcttgaccttgtgatctgcccacctcagcctcccaaagtgctgggattacaggcatgagccaccgtgtctggccgtgggaacattatgttttaactgtgaaacaaactaatttggtggtagtggagagaacaccctgttaaatatccaaaacgtatttttgcattattttcaataattctagttttttttctgtctttctagggtgtgccatgtgacttggtgacaggtgaagagcgtgtgacagttcagccaaatgggaaacaggcttcacatgtttcttgtacagttgagatgtgcagtgttacaactccttgtatgtatatgctgtttaagaaactatggtttggtatttttaattttttttttttttcaagacagagtcttgctctgttgtccaggctggaatgcaatggtactatctyggctcactgcgacctctgcctccccagttcaagcgattctcctgcctcagcctcccaagtagccgggattacaggtgcccgccaccacacccggctaatttttgtattttyactagagacggggtttctccatgttggtcaggctggtctcaaactcccgacctcaggtgatctgcccacctcggcctcccaaagtactkggattacaggcgtgagccactgcgcctgaccatggtatttttaattttaaaatacacttgaacatgtgaaatacgatttttttgtgtgaagaaaaaattttaaaatctagaaaaagaagagaataagtatgacaaacgtgcgatcctgccaccactgacaaatgcctgcacctgaagttctttccctttttctcttaaargagctgaaatgttaataagcataattgaaatttcctttgtaccactctccagtttaattcctctctcctcttttgttctaactggtaacagatatttggtgtgtatagttttcctgtctcttttcaggatatatattatatcactgatacgtattaccagtattctagattgttgtgttttaaaacatttatgtgattattgtattattattgttctaccacttgcttgtttactccacaaatgtgtttagatctatctagtcttattgaagtatctatagctacatatttgtagttatttcatttaaactgttttatagtattccatcttagaactgaaattatttgttccccatttgttaaaggatatttaggttgtttaaagttttttcctgttatgtacactgccacaatgagcttctatttaaagttgttttgttttgtttttgagtcaggggctcactgtgtcacccaggctgaagtgcaatggcgcagtcatggcttactgcagcctcgacctcctgggctcaagcaatccttctgccttagcctcctgagtagctacaactacaggtgtgagccaccacacccagctaattttttattaataaattttttgtggagatgggttcttgctgtgttgcccggactggtctctaattcctggccttgtgtggtcctcccacctaggtctcccaaagcagtgggattacaggtataacccacygcacctggccttaacatttaagtgaaaattaactttttccttattatgtaagcaatcatatcttcattattgaaaatataaaaatgtaagcaagcaaacagaagaaaacaaatgtacataatttcccagtcccacctatccggaatcaataggtgttaattaaccctatatattttccagactttgttaatatttgtgttcatgttgtgtatgcatatagttatatgtgcatggtgggtgtgtatattaaacaaataggaaggtactttactatttggtagcttgctttttttcattttaataatcaactttgtgagaagaatagtttttaaaaaatcaatacattataaagtaatatattgtacagttgcacagaagtttataaatcagaatttcttctctatgtcttctcttctagtctygtttgtacatatccagatcacgaagtagtttttttttttttttttttgagacagggtctcactcctgtcgttcaggtgggagtgcagtggcacgatgacagcttattgcagtcgtgacctcctgggctcaaacartcctcctgcctcacttttaaatttttcttttgtagagaagaggtctcactttgttgcccaggctggcctcgaactcccgggctcaagcagtccgcctcgcctcrgcctcccaaagtgctgggattacaggcatgagccaccatgtccagcctcaataagtaatttttaatctgatgattgttcaatataaaattagctttctttactttcctaagtgtcattgtatttttaaatgttctcttttcaattctgtagtatttggggaagaaagtaaaatataatatatgaattacagggaatagaataaggtatttggaagcattttagctttagaaaatgagatgagacactactttttgccatagcgatggatttaaaacccctaaggatgagcatgactgaggcccaaggaattattccttccacttyactttctgctcctgagagctgcctggtttcctgtggtagagatgcttcattagtaaatgaagggctgtcacctccttgttctggaacttgccttcttcttttacttctgtccagatgtgatagttctcatcagagaaattctccaggctgtctcttagattgcaaaaaaacaggacaagtggaactgctcagtgtgggaggcagtgtggtagagtatgtaagagtatggacttggagctggatgtggtgacttgtgcctgttaattctggctacttaagagattgagatgggaggattgcttgaggccaggagttcgagaccagcctgagtaacatagcaagaccctcatctctaaagaaaaaaaaaccttttttttttttgagctggagtcttgctgtgttgcccaggctcgagtgcagtagtgcaatcttggctcactgcaggctccgcctcccgggatcaaatgattctcctgcctcagcctccagagtagctgggactacaggcgcacgccaccatgcccggctaatttttgtatctttagtggagacggggtttcaccatattggccargatggtctcgatctcctgacattgtgatccacccgcctcgacctcccaagaaaatgtttttaaaattagctggtcatggtgctgcgtgcctgtagtcccagctgcttggaagctgaggcaggaggattgcttgagcctaggagtttgaagttacagtgagctatgattgtgccactggactcaggctgtatgacagtgagacactgttaggaagatcactttcaacccaggagttcaaggccatcctgaacaacagtgagaccctgtatctaaattaaaaagaaaaaaaaaagagtatagactttggagctagatggcctgggtttgaatttcatctctgcayttaactgtataacttaaggcaagtaacttaatttctctgggcctctgactttttctgtcaaatggagatagtgataatacttaacctcatagatttgttgtgaggattaaagaggaggtacttaagaggaggtaaaacacttagaacaaacctgctggaaaagaggaacccagtaagtgatggtggtagtggtgatggtgatgcttgaattttggtgttggaatttgtttataatactatttaagtagatggtattgctcatgttaacttttttattttaagatgaagtggctgtaattgatgaaattcaaatgattagagatccagccagaggatgggcctggaccagagcacttctaggttggtggtcgtaatgctataaaacccgtgctttrtgacatctgcgctgagatgcatttttatctgcttgccattgccaaccaaatagagtcacctagaacctttctttttgacacaaaaaagtaaactaagtatgagtttttattttctaaatattattttaataatgggaaatctattttttcctgtgctaaaactagcataaccatgtaattaaagttaaaatgttcaaatctcatatttacacaactacartttatgttttggtgtgtttcatgctagtcttttcttttttgtatgtgcatatggtgttttgagaacattagttttgtatcttgctgtttttcatgtgacatttttcattatgtattaatatgatcgcatatctctattgaagggcaatactgtaatttgctccatagagttgaacctttttttccctattactaataacgctgcagtaaaaatctttgtggccaaagctttttattttttgagacagggtcttgctctgatgcccaggttggagtgtgatggcrcagttgtggctcactgcagccttgacctcctgggctcaagcagtcctcccatctcagtctcccgagcagctgggaccacagctgtttgccaacatgccccctggttaactttttaaattttttgtaaagacagagtctccctatgttgcccaggctggtcttgaactcctgggttcaagcactcttcccacctcagcctccccaaatgctgggattacaggcatgagccactacacccagcttattttttatctttttaattatttctttaggataggctcctgtaagtggagttcttgaggtccatagacatgaatgaacatttctactgcttgatgttggagtgaatttttgatcatgttttagggcagatgttttcaaatttaaaaacaaatagctgaacttggctgggtgcggtggctcacgcctgtaatcccagcactttgggaggccgaggctggccgattgcttgaggcaaggaattcaagaccagcttggccaacatggcgaaaccctgtctctactaaaaatataaaaattagccaggygtggtggcgcatgcctgtaacccagctactccagaggctgaggcacaagaatcacttgagcctggaaaggagatattgcagtgaaccacagtgaaccgaggtcatgccactgcactccagcctgggcgacagagcaagactctgtctcatggaaaaaaaaaaaaaggctgaactctttttttaaacaaagagtatacattgaagcctgttatgtaaaatacatggaagtggatctgctcggggataaggagcttggagtttcttctgccctccaacccccaacctctgaggtacctcagcgattccatggagcctaatttgaaaaacacaagtatagggtctgtgttcagtacttagcatccaaatgccagcttctaatcctggctcatttcactctgatagagttgaaactttggccaaagcaatttaaaaggcctgagattaataaaaattggataatctttgcccattagaagttggtgattatttcaaggtttgcatcagagataatatttttgaaaatacttggtaaggttgtaaagcaatatgtaagccaacgtaaagtactttggctatgtaaaatgttgtatatttaattataaatctttaaaattaagaaacccagttttgcattgacaggactgtgtgctgaagaggttcatttgtgtggagaacctgctgctattgacctggtgatggagcttatgtacacaacgggggaggaagtggaggtattcgattagatgctttgttctccaggtggcatatcaaatagtccagagtacctaggcagtggcttcagaggccctagataatgccagcgtcagaacttaactaaaaagaaagcttcattttcttgtgatcaactagaccatatatatttgattgaacctcatgatctgaagttctgacagagtggtcatcacaccctaagtcttccaagagtacaggaaattcttcacttcttgacaaaaccttgtggggcttgagtagatctcttcgaattaaataaatcagtactcttagaagttggagacccagcaagtttgtcgttttcaaagtgttgtatgtcagatattggggcctttgatacacatctaattgccagacacagtttatattcctttttgaaattcttagagttggaagtaactggtttccttttaatcctgcttctctttttctttaccagagttctatagtaaaatgaattattattattattattattttttgagacaaggtctcactctgttacccaggctggagtgctgtggtgcaatcacaactcactgcagtctcagcctcctggactcaagtgatcctcccacttcagcctcccaaatagctgggactacaggtgtttgccaccatgsccatctaattttttattttttgagcagagggcatctcactrtgttaccaaggctggtctcgaactccagtgctcaagcaattctcccaccttggcctcccaaagtgctgggattataagcataagccaaggaaatagttttgaattagcctgttattttagttttgtgctcagttttcaaggagagatagtggaatatagtggaagaaattttggagtccattctgtgttttgccattcttagctttgcattctttagacaagtcacagaaggttagacttgcaaaatgtgcctcagacattaattttttattgggctcagttttactattttataaaatggaaatagcagttaataacctttctgaacttaacasattgccgtgaaaatgaaatatatgagaaaaagctttgaaaacaggtgaaacactctgtttcatcttattaatttagagatgccaatgagaagtgatggtaacacttataatatcaaaataaatgtttttctgtgttttcttttgaaaaacattggtacttatcagtttttagctactcttaactgcattacaatcttttcacttaattactagtcacaagaagttgagttgggtgtgtcattttgccatttcatgtctttattgtaggttcgagactataagaggcttacccccatttctgtgctggaccatgcactagaatctttagataaccttcggcctggggactgcattgtctgttttagcaagaatgatatttattctgtgagtcggcagattgaaattcggggattagaatcagctgttatatatggcagtctcccacctggtaattattgactttcctygtgacaagatatgaaatctcctatctttgcaatttatgttgagatatatataaaaaaatggtaaacaatattgaattaagctgcttgatgtattggtaatttgttaaacgtcatataaaataaataattttctatttcatcttagtggaaatagaagtattttaattatagttcttgttagttgctgctattattagactgtatcttaaatgttgagtttattattttcttacagaaatgtcattgaaatctggtcttgaccatgtccttttaagttgtagtcctgaaatctgtgtcctcaggaataaggctagtgtggtgggggattgtgttgctatatgacggagtatttgaaggaatggatgtaaaggataagtggctctttgaggatataaagaaataaagtttgaaacagtaaaggttttatcattaaaaatgggaagaacaggaggtgagggtttccaagatgtacttagcttgatgtaataaaagactgagaacactgatttaacataaattgttcttgttttagggaccaaacttgctcaagcaaaaaagtttaatgatcccaatgacccatgcaaaatcttggttgctacagatgcaattggcatgggacttaatttgtaagtaatttgtttttaataagatgaatatttggtgagttaaatggtggtttttttgtttttcagttttctamttggcattaatgaccaaacgctatgatttgggagaataaatattataggctagatttgaggtttgtcttgcctacacctattgagggaaataaaaagaaaatattaaatagtgccaggacttttcttagggacagggtcttgctcttttacccacgctggagtgcagtgatcaaattgtagctcagtgcagtcttgaactcctgggcccaagtgatcctcctgcctcagcctccagagtagctgggaccacaggygcacaccacaaagcctggttattttctttttttttgggtagtgacaaggtcttaccctgttgcccaagctagtctctaactcctggcctccagtgatcttcccacctcagcctcccaaagtgctaggattacaggcatgagccactacactcggcccacactaggacgtttgaatgctgcccaccactactgctaacctattgtactacgtcactttactttcagtttctcagtcaggtgtccgagtgcctattatgcacrtggggctagttattatctctaaatgataacaatgttaagcctaaatattatttatttatgtatttatttatttytgagacagagtctcactctgtgccccacgccggagtacagtggtgtgatcatggctcaccgcagcttcaaactcctgggctcaagcggtcttygtgcctcagccccccgagtactagagcaacaggcacacaccactgaacctagctgatgtttttaattttttgtagagacttgggtcttgctatgttgcccaggctggttttgaactcctggcctcaaaacaatcctcctgcctcagcctcccaaagtgctgggattatgggtgtgagccactgtgccagactttccttaattttgtaagtggcagtcaaggttgcaagaggacctaagctagtattggagtgagcattatgcaatgacccaagtattggagggtttttcatacagtctgcaggatcacttttatttctgtttcaggagcataaggagaattattttttactcccttataaagcccagtatcaatgaaaagggagagagagaactagaaccaatcacaacctctcaagccctgcagattgctggcagagctggcagattcagctcacggtttaaagaaggagaggttacaacaatgaatcatgaagatctcagtttattaaaggaaattttgaagaggcctgtggatcctataagggtaagaggtaacatgttaactactgcttctctgtggaggagagtcattctttccctcacccaccatccagactctcacctcagacacatttctggatacagacataagtgaaagaaaattttgtgccatgaaaactgcattaaaaaaagccctactttattgctttggagagccacagagttctttgatcagagaatggtatgcaagtgaaggtccagattgacaaagtttagtgagcctgatttgcctttacttccttccggaatctagcagygggaaggaacagggagaaaagcagtttcttcagctgagcacacagagctacattagtggactgaaaaatgaccagaagcctgaatatagacgaaaccttgtattgcttggggcaaaaacagccctaagcaatacaacttcatccagtgaggagaaggttaaattttggttaatattagttaatgagttagaattgtacatatttgaaacaaactttctagtaatagtcaaaatttaaagttccctggaaaattcacttacatggcttatctcatttgtgacactagatgaaggggagtatagacatgagatcatacagggagaagcatgcagggagagaagcttccaggggaaggctgtgctggaatcatttctgtaacttctyagcagtacagttaggttcgtggttggctcctgtgacctccctgcttccctcctgggcacctcatgtcttggactcttcttccctcccttatgactaatttctcttgcctcttttcttctgtctttttcattcactttctctctctgtttcatacttcattccttatactttcctgtggccatgtcctaacgstgtaatgtgtagctaaagagaactcacttccagtttaaaaatgttctcatgtctttctagatgtatatatctatgttagttttattgccttggttaaagtgactgggtttttcttattcattttaattcaatgaggagaaatgagacatggaaaatggttttaccctggaaaacaggtttttctttcctttttttttttttttgagatagtgtttcactctgttactcaggcttcagtgctgtggcatgatcacggctcacggtaaccccaatctcctgagctcaggagagccttgcacctcagcctcttgagcagctgggacttcaggtgctcaccaccatgcttggctgattttttaaaaattttttgtagagatgggaatctccttttgttgcccaggctgatcttgaactactgtcctcaagtaatcctcccaccttggcctcccaaagtgttgggattacaggcatgagccactgcacctggccrtaaaatctttttttttttttttagacggagtcttgctctgtcgccaggctggagtgcagtggcgcgatctcggctcactgcaagctctgcctgctgggttcaagtgattctcatgcctcagcctcccgagtagctgggattacaggcacgcagcaccacacccagctaatttttgcatttttagtagagacggggtttcaccatgttgggcaggatggtctcaatctcctgacctcgtgatccgcccaccttggcctcccaaagtgctgggattacaggcatgagccaccrcacccagcccataaaatcattttttgtacactgccagatcatcataggttttagaaatataactaaaatgtaagcaaaagactaatttctcagtggccataatctgtcatttttactaaatcatcaacttttctaattggtaataaatggtaaaatgatattttttctcttttactcaaattcttggcatttacttcatatggtgagagcttagcctgaatgggactttatcgtgcaataacttaagaaaatttgtcctttttgaaaaaaaaaaaatcagcttatgattgttttttcttttactaaaaggcagctggtcttcatccaactgctgagcagattgaaatgtttgcctaccatctccctgatgcaacaytgtccaatctcattgtaagtggaaactccctttcacatctcccctaaaaatgttratatgtcaggtgattactggttaacctcatgagcatgaatggatagtctgcctttgagaagttgstatttataaaatttattttacaagtgaaaattttttctcaaaatcttttgggactttagccctgaggaatttcctctcagtatttcaggtggggaaggatatgagggagtgattaaagcaagcctttatggaagtttgttctggattaaagagattgtcttttatagacttgagtatgttattcattgttcattttaattcacttaggcagtccagtaatttctgtctttttttccccaaggatatttttgtagacttttcacaagttgatgggcagtattttgtctgcaatatggatgattttaaattttctgcagagttgatccagcatattccactaagtctgcgagtgaggtatgttttctgcacagctcctatcaacaagaagcagccttttgtgtgttcttcactgttacaggtaagcctttatctttaagctattttgagttccttctggttgatgcasgttccccaaacagtactttgttattcaaaataaaataattacaagagtattcwgtaatatgagagactttgtaaaaacttaaataggggttaatagtagcaacagtgttcagttttcttaagtgtaaagcactgagccaggggttactgtcttgtatgagcaccatgccagggttctagcctcttttaactcatttgggtagggatgcaaatctctgacttctgagaagcacaggattcctgggggccaggaaggacagtggactatggagaaccataaatctctaccaaggccgggtgcagtggctcacgcctgtaatcccagcactttgggaggccgaggcgggtggatcacttgaggtcaggaattcgagaccagcctggccaagctggtgaaaccctgtctctactaaaaatacaaaaattatccgggcatggtggtgggcacctgtaatcccagctactcgggaggctgaggcaggagaatcacttaaaccaaggaggcagaggttgcagtgagccaagatcgcaccattgcactccagcctgggtgacagagcgagactctgtctcaaaaaaaaaaaaaacaaaactctaccaaggtttatcataacaatacttttatttaatttaattttatttattttatatttgaggcagggtcttgctctgttgcccaggctggagtgcaatggtgcaatcacagctcactgcaacctcaacctccctggctcaagtgatcctgccacctcagcctcccaagtagctgggactacaggcatgtgccaccatgcccagctaatttttgcattttttgtagagacagatctctctatgttacccaggctggtctcgagctcctggaggcaagtgatcatcccacctcagcctcccaaagtgctgggattacaggcatgagccacctagtccagcctaatattttaattattaaaaatgtttttgaaaggatccaaatgtccaacaagagggaaaaggttaactacattatggcatatccacttgattggatattaggaagacattgcaatgataattatgattataatgaagaaatctacataagtggttacactataacagtaagtgagggaagcggttcagaactgtatgtaccttataaacataacatgttctctcacctcccgccctatttcctctgctttgcatgctctccccaccccactaaacccaaaggcctcctcttctctgaatcttgtcctgactcactgaggttcactgccatttcctctgtaggcctgagcattctacatatgagctatattctaatcaaatctagctctaaacttattttttaaataacataaatagtccagtgctgtggctcatgcctgtaatcccagcactttgggaggcaggaaggattgcttaagcctaggagttcgagaacatctccagcaacatagcaagactctgccctttaaaaaaaaaattacataaataatacatacattctctttatacaaaatgaraacattacagatagcttaaatgtggctccctccccaatcttagtcctctgaaataactacttgtgtaagtttgtgtgtatctttgcagactgtttttcattgcgtttgcctatgtgcatgttcatgtggaaacactagatttgttgtgagggtgcatttccccataaaaaattatcttttttttttttttgagacagagtctcactctgtcgctgaggctggagtacagttgtgtcatctcagctcactgcaacctctgcctcctgggttcaagcgattctcgtgcctcagcctcctgagtatctgggattacaggcatgtgccatgcctggctaatttttgtatattttgtagaggcagggtttcgccatgttccccaggctggtcacgaactcctgagctcaagcagtccacctgcctcagcctcccaaagtgctaggattacaggcatgagccattgtgcccagccctatcaacgttatcttaatgaattactcacaacttgccttttctttttctcttaataatatgtgttagagatcttccatgtccagatgtttacctagaaaatatgtttcttagagctggcatttgtgaaaaacttagctagcataaggttgaagtttatggaacagtcttraactgctgtaaactgacctgagtggaactcagtcccatggccttggcaccattcacaccatcctttaaacagctattctagtgaatagaagctctttactaaggtgtagggagtctctggaacatgcaggtcaacagttgcttgttttcttaagataaggtctcactatgttgcccaggctgcagtgcagtggcacaatcatagctcactgtaaccccaaactcctgggctcaggcgatccttccacctcagcctcctgagtagctaggactacaggtgtgcgccatgatgcgtggtgtgttttctttttgagatgaagtctcactctgttgcccaagctggagtgcagtggtatgagcttggctcactgcaacctccgcctcccaggttcaggcgattctcctgtctcagcctcccgagtagctgggattacaggtgcccgccaccatgcctggctaattttttgtatttttagtagagatggggtttcaccatgttggccaggctggtctcaaactcctgacctcaagtgatccacccgccttggcctcccaaagtgcagggattacaggcatgagccaccacacccggccgctccgtgtgttttctgtttaaaaattagaatatgaaatctagaggcttttccttttttcctgatctttgtcattactgaactatgaaagagctcaatcacattaatgacttaggatgccccttaggactgtgatttggaagctgtgctccatggagctcctttagggccagctgctggatggatggatggatggatggatggatgggcgggcatctctccctgctctctctgcatagctccttacttagctcttttatgtattgggcttccactagttgtttgtggccaaaaaaaatagagccactgcctttataagataacttgagaactcatgcttggcctgtcctgcctagcaggtagtgtggtcacatttctaccctttatggctatcctacttggcatttattaaacttagcagagtggaccagactgaatttaacaaaattgtggcattatttaactacaattgatctaaaactgctcttcctctctgaagtattaaccttgcttaggttaagcatttagagataatttcccctaatcaggaaatgaatcatttgaaatcagcttgaatcttgaagctgaagattttatttaaactcttgcttgaggggtcttactgtgtggttgtatgtctatcttctgtagtacaggtgatgtataatattgcctaattctgggatgcaacatggttttgaaagcacattccccagcagtgtcttgtggttcaagacagggctgtgatgtctcacgttaccagtgaggaagctgaagcaaagagtgttgacttggccaaagccacacagctcgcaggaggcagatccaagattgacttctgaccagccttgcaccaggccacctcagagggtttctatataataagggaggacagccaggtgcggtggctcacgcctgtaatcccagcactttgggaggccgaggcgggtggatcacaaggtcgggagtttgagaccagcctgaccaacatgatgaaaccccgtctgcactaaaaatacaaaaattagctgggtgttgtggcgggcgcctgtaatcccagctactcaggaggttgaggcaggagaatcacttgaacccaggaggcggaggttgcagtgagccaagatcgtgccattgcactccagcctgggtaacagagcgagactccgtctcaaaaaaataaaaaataagggaggacattaacaagatagagaaacttaagctcgtatttgaggttataggactattacatatgagatagaaataggagtcttcaggtactgtctgtccatagctttagaacatcacatattcctaaataagagttaacagacttaggccctggaaagttagtccttctacagcttctttttttttttaactgctccttgtggagcagggataccctataggtagtgtgcccagagtagcccttgaacttctgctgcacatattattaccctggttttagaaaaagaaggaaatcatctttttttgttttttctttctccaaatggtctcactgctggagtgcagtggcacgatcatggcgcactgcagccttgacctccctgggctcagtaatcctccacctcagcttcctgaggagtagatggaatcacaggcacacaccaccatgcccrgctaattctttgtgttttttgtatggatggggtttctccatgttgccccagctggtctcgaactcctgggctcaagtgatctacccgcttcagactcccagagtgctgggattatagacgtgagccactgtacctggccttataaagtattaaatgttctttaaaatgtagaagagtataaaggagaaaagaaaccacctgtctattgaaatacaaccacaatgttttgttttgctttcttttttttctctttctaattatagacttaagggaattctgacacttctctgaaacccttttcctctttctctctcagtttgccaggcagtatagcaggaatgagcccctgacctttgcatggttacgccgatacatcaaatggcctttacttccacctaagaatattaaagacctcatggatcttgaagctgtccacgatgtcttggatctttacttgtggctaaggtaccaacakttttcctttatgtgctctcatttttctagtaggacaaattaaaggttttatgaatttgtttttctatttcaaattatggacatatttgcaagatgctctatattatgtctattgtccataaaggcaattcaactgatggaatggtttcccattccaaaaatgacttgagttcttgcaattctagttaagatggctaggtgagaaggaaggtccactggactcctgctggtcaaaggatggtccttggaccaaaagcattggtatcacctgggagcttgttagaactaaggagtatcaggcccatgcctgacttgatcagattctgcattttaacaagatccctgggtgattcacttgtacattatcatttgagaagtcctgttctaggccagtgattctcaaaggaggggcatgtccctctccaggagtatatcagagtctattgaggtatagtgctgacccaccctcaggatgacatattcctcsgatatktgggggcagaaatcaaggttgagcaaaggcactgaagagrgtttgcaaaaagaacatttagaatttatcaatgtcatgatgtaggtgtgccattgagagttgtccagtgactgcgataagagctgttgctataatgctaatgtgtctttttcccagctaccgatttatggatatgtttccagatgccagccttattcgagatctccagaaagaactagatggtattatccaagatggtgtgcacaatatcactaaattgattaaaatgtctgagacgcataagctgttgaatttggagggctttcyatcagggagccagtcacgattgtcaggaaccttaaagagccaagctagaaggacacgcggcaccaaagctctagggagtaaagctactgagccacccagccccgatgcaggagagctgtcccttgcttccagattggtgcagcaaggactcctcactccagacatgctgaaacagctagaaaaagagtggatgacacaacaaactgaacacaacaaagaaaaaacagagtctgggactcatccaaaagggacgagaagaaagaagaaggaacctgattcggactagttttctgttcctgtttttttttttttatttaattttgcaaataaaaatttattttgaatcctttttcctcatatgcatttactccctcctctagtattgtggctatctggtactgggggatttttggtgtgtgtgtgtgtttgtgtgtgtgtttttttgtttgttttttctttttttgcacagaaaaatctctcttgatgactaaacttgtttttttttttttcaacatttagaaaatactaggatatcatggaggtttaatttaagtctttatataatggccatttgtagaatagtactaagacagtgcactataaggaactctgcatgggaataaaatcactttggtgaattgtttgaccagtttcctgtgccatgctgaggatgtcatggatgcagttctttgacaaacattgctgtctgttgtacccatataccagaggctatttaggtgctggaaatatgcagtaagcaagactgacaatcttctaccctcatggatctcatatttggtaggagagacaggaacaggttaacaaataaatcctgtcagatcggtgagggcagagattgtagtctatttcactactgcatccacagtatctggaatatagcagaagcaaaatcattctttgtgagatgaatgggtgtaattttagagatgaatgctagaaagaataaggaaagagtgatgctgagtggcagggaagggctgttttaggtagggtggtcttcccttgtccaaaggccagcctacacttgttcaacgaagttttcaaccctgttcagaaacctagctaaaaggggtttaaaggtggaggctttggagttagacagatgtggttccttttcatatcacagcttagcagccttgccatctctgggcttgatctcacatctgaagaaaatggtcagtatgctcacttagagttgtttgggaggttaagtgtgatcacgtgccatttagcacagggcctggcacacaggaagcattttattatataaatgaacctgaaggtttgggtccagtctgggctgtgaattgagctctcagattattctgacaactgaactaatttcttgagcaactattgaattggggctgacctcctggtagggattaaatatgatttgactcaaattgggtgagggaacgtagccagatctgcaacctctctctgcttttttctttggtggttcagaggtaacatttaactgagatgacaatcttcattctgacctttgccttcatgggagtaaaggctgagtgggtggcactgactctatttcctccttgcttatggataaactagtgaaatgcctggaagggcttatctcttgatattctgcagtggggcaactgcagcttctagaatttgcttacccctgtgacttacaccatagcagacataatcattcttgtccagatggttacaagaaatacctatgaactgaaccaaatagtggatttggtcccatcgtatgtaagtgatggggtgcatcacttagaatgctgttaactctcccattttctccagtttgggggccagagttgttaagtcagagaaaggacttaggcaagacacttaaaaactaaggcaagtgaaaagtcctgaatatgttaaataaagaagtggctgggtgcagtggctcatacctgtaatcccagcactttgagagaccaaggcaggaagattgcttgaggccaggagtttgagaccagcttgggcaacacagtgagaccccatctctacaaaaaatttaaaaaattagccggatatggtggcattcaccagtagtacagctccttgggaggctctggtggaaggatcacttgagcccagcgtgttgaagctgcagtgagcagtgatcatgccactgcattccagcttggacaacagagcgagaccctgtctctaaataagtaaataaataaagcctcaaataagagaggtgggggtgggaggtcctgtaaaggaagggctgcttgaacattcagctaacgagcatttatagtgatagtttgccctttcacgtctccttcctttggagggaaaggagggaactgtggttagaagaagagacagactaaagaaaagatggcagcatgtgaagcaaaacaggaaaaatagaattggagtggccctggagaattatcttcagtgtacctaaaattgtcaccaagaaagcagcctagtcttccttctctgcaacaagcttgtcatgtcacttatctttctttgtgggcttcagggccagctaaattccaggcattcatttccatttcactatggtcatgtcactctttgtgagagacagctctttcctgtccttgcagtcttctcacggattgtgaagtactcacctgagagccctccgtggattattatggattccactgaacttaaacatgggatgtggactaaggcttagagactaatctcaacctatcactatacagacctgataatttaataaaatgtgattagaaaatgactgggaataatatccagtgacttgtaatgttttgtatgttatatatatggaagagtgtaaatctgcaaaatgaaactcttgaaaagtgactgtaaatcacaaatatataaaactatcatcacaaattagagtctcttatgactcaaaactgggagtctgtaattatgatgcagtcattctgtgtgtgtctaactcaaacctattaggatgtaatgaaaagtagagatttgctatgggacaggcaaatggataagggagtcatgctgagatttccctcccctgtttcacagctttaaaatacataaacctggctgggtgcagtggctcacgcctgtaatcccaacattttgggaggctgagacggacagatcgcttgagctcagaagttcaagaccagcctgtgcaacatggcaaaaccctgtctctacaaaaaaagcaaaaattagcccggcatgttgatgtgcgcctgtagtcccagctacctgagaggctgaggtgggaggatcacttgagcccaggaggcggaggttgcagtgagctgagatggcaccactgcactccagcctgggtgacagtaccagaccctgtctcaaaaaaatagataaacctccacctatagtatctctagataaagtaatttttaagttttcttctgtttcttacgttattctaattccttttttttttcccagcttggtttgatttctacctttattgttggaaacttgtctcatgtgtctagcgatccttgcctgtgtctatgtttaaaagtgaagaaataagctaatggagagctctgtttataggcctaatgtcttttcagtttttatgcaggttgattggatgataagctggctttttaaatgattccctaaatgtcagtatctgtaaggtttattttactttattttattttttgagtcagagtctcattctgttgcccaggctggagtgctgtggcatgaactctggtcatacaacctctgccacccaaggccaggtgcagtggtcacgcctgtaatcccagcactttgggaggccagtggggtgggagggagtgaatcatgaggtcaggagttctagaccagcctggccaatatggtgaaacccagtctctactaaaaatataaaaattagctgggcatggtggcgcgtgcctgtagtcccagctgctcaggaggctgaggcaggagaatcccttgaacccaggaggcggaggttgcagtgagccgagattgtgccactgcactccagcctgggcgacagagtgagactccatctcaaaaaacaaacaaatatacaaataaacagaaaacaacctctgcttcccaagttcaagcaattctcctgcctcagcctcctgagtagctgggattacaggcgtgcaccaccacacccagctaatttttgtatttttaatagagactgggtctcaccatgttggccaggctggtctcgaactcctgacctcaggtgatcccaaagtgctagcatgagccaacatgccaggcagtatctgtaaggttttttgtttgtttgtttttgagatggagttttgctcttgttgcccatgctagagtgcaatggtgtgatctcagctcactgcaacctccgcctcctgggttcaagcaattctcctgcctcagcctccagagtagctgggactacaggtgcacaccaccacagccagctaatttttgtatttttattagagatgaggtttcgccacgttagccaggctggtctcaaacttctgacctcaggaggtccacccagcttggcctcccaaagtgctgggattacaggcgtgagccaccacgcctggcctgtaaggttttttaaacataaacttaaaaaaaaaaagttaggatagttttagatttgcagaaaaattgcaaagataatacaaagaattcccatatacccaacacatttcccctattaacatcttacatttcccccattaacatcttacattagtatggtacgtttgttataattaatgaaccaagactgatacattattattaactaaaggccacaggtttttagatctccttagtttttacccagtggccttcttctcttttggatcccatccaagacaccacatgacatttagtcgtctccttaagctcctcttggctgtgacagtttctcagacttgctgtagatgatctcaacagctttaagtactaatcacgtattctatagactattcatcagttgggatttgtctgatgtttttcttatgattagactagggtttgggttttgggagaaagagcccagaggtaaggtgctggtcttatcacctcatatcacggatctgtactgtcaacatgacttcaccctgctgaagttgaccttcatcacatgcctgaggacaacgtgtcaggtttcttcactgtcatgttacccttttctcattttccatactgaactgtctggaaagaatcactgtgtatactgtgctccacctctttgagggtggagtatctgtgttcattcttctgcatgggagattggtcctttctccctcacttatatatttatacaattatttgttaacatcagtatgggctaatggaaatgtagactttgggttataatccaatcatactttatcttgcccaattttttctttctttcttttttttaacactcctatcaatgttttctagctttggttattaggaactttttcactttcagttggctcctgtgttcctttgacacatccgtatcatttggtttttgttttgttgattacttccttcctttctggcactacaagatgcgccaggaccatcttgtatagacctggttctttgatctgggcactaggtgtgcttgttgctactgggtgtcattacttctagtgtttctcagctgacaaagcaaggacatatgcacgtgtatactaagctatatacacgtcttcaaatctttatataaacatatatgtatagtcatctatatgaatatcaagctaaacatgagtgtatactgatgtcctcaattctaatccagtgacatggatcattctagccttctcccctgcttgaagcctctcactccagcagcaagaaacctccctcccgccatccaccatccatgtacttaattgttcaattccagtattcttgtgtagtggtttcagaattgttaagcgtgctcttgcaggaagcaactttatcaatcagaatacagtgctacatacacttccttttacttgtagtcttactctattaatttccaaagtttcttaggtcagcatattttccctccccttccccttcagtgaggctatttcacacacttgcaacacagttagactcatgtcacagtctgtgttgcgtcgctgacctcctaaatgtttttttgaatgtatgtacattaaagttcattctttgtgctgtcaaattctatgggttttgaaagtgtgtcatgtatttgccgttacagtgtcatacagaatagtttcactgccctaaaaacgcccttgcgtttcacttattcagcatcccccacctttccaaatccctgg

SEQ ID NO: 95270 - DNA, 59213 bp, Homo sapiens
atagacctggttctttgatctgggcactaggtgtgcttgttgctactgggtgtcattacttctagtgtttctcagctgacaaagcaaggacatatgcacgtgtatactaagctatatacacgtcttcaaatctttatataaacatatatgtatagtcatctatatgaatatcaagctaaacatgagtgtatactgatgtcctcaattctaatccagtgacatggatcattctagccttctcccctgcttgaagcctctcactccagcagcaagaaacctccctcccgccatccaccatccatgtacttaattgttcaattccagtattcttgtgtagtggtttcagaattgttaagcgtgctcttgcaggaagcaactttatcaatcagaatacagtgctacatacacttccttttacttgtagtcttactctattaatttccaaagtttcttaggtcagcatattttccctccccttccccttcagtgaggctatttcacacacttgcaacacagttagactcatgtcacagtctgtgttgcgtcgctgacctcctaaatgtttttttgaatgtatgtacattaaagttcattctttgtgctgtcaaattctatgggttttgaaagtgtgtcatgtatttgccgttasagtgtcatacagaatagtttcactgccctaaaaacgcccttgcgtttcacttattcagcatcccccacctttccaaatccctggccactactgacttgtttactgtctctatagttttcccttttccatacctgtgggtttgggtttttttggggttttttttttttccgctgagatggagtctgggtctgtcgcccaagcttgagtgcagtggtgcaatctcagctcattgcaaaatctgttccccaggttcaagctattcttgtgcttcagtctcctgggtagctgggattagaggtgtctaccaccatgcctggctaatttttttttgtatttttagtagggatgggggtaccacctgggccaggctggtctcgaactcctgacctcaaatgatccacctgccttggcctcccaaaatgctgggattacaggggtgagccaccgtgcctggccaagcttttttatatagctttttaaccaatctcttgtttttggctctatgtcttgccccagacctctgattcctgagcattttagagttttacaaacgtcacagctcctttctcacccgagtcaccctctgcgggcactcaggtttcagtgtttcctctactaagcaattacttcygtgagcttcctgtcttccagaattatgttaagatctcttatcagtcactgtttcctttctttttgtccttgtaggttaatgccgtgtttaaccagaagtctcatttgctttgaaaagttggttattttgtgcaattgagattgtaattattctgaaaaatgttaaaagtcacatgaactgcattttcttgtatggcttttctttccttgataggtgttttgcaaatatgacccttaatgtacagttgtgatttagaaatcgtgtcagaatttcttcctgagcattccttgtcttcggttcagaataaacctgtaaaaatgattagcagcattcttttgaaacttgctgaggttagcatttctgcttcatttgtggctgctccgatagagacaccattgtgactgtaaccactggcagcgtttggaagtctctacattggttttcttattatggaagtttgctctcccacacagtttctgattcttttgcagcaagtggaataccagcaggtcacaytgatttatgttatgacgatttaactttggacttaccattaaaaagaatacagggcagaattcaagagctgttttctttagtaacaggaatagaatttccataaaattcccaactgttcctttaattccagtacatggaacaggtactttctaatggtttaggatcatgccttactgagtggactgaaaggtctgcacacattttcttatcccaagagaccaagttgggtgagcgaagaggggtccccagccagggaaaggctgagcttcaggagatgcttctagtgtgcccactgtagaccacatgcctttccttgtgtgataatttgctttctttctcactgtgaccactgacatagctatgaagcttttacagatatgaatatagacttggacctttacctgcagtttaagaaaagccaaagtaggaccccagggcctgtgcactttccactgtgttagaaagagcttagggccatttttccagctgaggccccaagtctccccgtgccttgtttccagcctagccagtgtagcacagcgggcaagcaagaactctgcagctagactgcctgcgttcaaatctcgatttcactgcgtcccagttgggctctgtgccttggtttctccatctgtaaaatagggagaatgacagttactgtggaattaatatcgtaagacatctagtaaaccccatggggaagtgtttgctaaataaataggtaaattttgctggacttctagtcctcccaccatactcagtacttaaagagaaacagaaattatctttgagccttgccaaaacggaccgtgtagattaaagtggagctctatgaaacggagatgtgtctacagatgggagagtttcccttcttacatggaagatttgggccagatgggtgatacgctttaactaaaatgtcacttgtcagtgtcggccctcaaatgggtgttcttaagcaaaatccaactacttataagatttaaacctagatatccttgaatagccaatagaactgtagtaagggtgaaaaatcccaagacttgaattggagtaatcagatgaggaatgataaaataacctaattattttgtcttgattctataaagtgagagggctgagctagatgactccaaatgcatgtgatctctgtaatcattaaacttcctggtttagtcaccttactcaggcctggaatgtagacgctaatgtgctcagattaaaaagggaatgatgcaatagatgaaaatcctctggtgtcatttgcctgattaaaattccaaaggctgcctatctgactcacacaagcaaccgtgagattacagagatctttggttatggtttgcatcttttgaccactggctactgtaacctcttatccctatgtcgaacaaatcaatgacagttggtgcatactgcactgcccaggttacatttttttttttttttgaaatggagtctcactctgttgcccaggctggagtgcagtggtgcaatattggctcactgcaacctccacctcctgggtttaaacagttctcctacctctgtctcctgagtagctgggattgcaggcacccgccaccatgcccaggtaatttttgcatttttagtagagacagggtttcaccatgttggcaaggctggtctcgaactcctgacctcaggcaatctgcccacctcccacctcagcctcccaaagtgctgggattacaggtgtgagccactgcgcccagcccaggttactttttaaatgggggaattaaatgctgggtgtggtgatgcaagcctgtagtcctagctactcaggaggctgaagccagaggatcacttgagcccaggagttcgaatccagcctgggcaagactggatggagttcaaatccagcctgggcaagacaagatgtagtgagactctgtttctgaaataaatcaactagtgggggaattaggataaataatgtcatcacttacgggcagatggccttcccaggatgttatcctcagccaatgggggctagggcctaggatgcgcatttcagaataccaacaattccacctggtttggggcactgaatggtttggggaactaaaggttcatctttgtttgcttgtgtaataaaggagcaagctraaagtcatagtctgagggtaaattgactgaaaaggatggggatcctcaatctgggagacagttttaatatgcttatatcaatctgaataaagcatctggagtaattttaaccgagcctcctctgcattgtgggcttaagtgagacctgatggctcgtccacacggcaatgggtagagagcactgaattccagctactcaggaggctgaggcaggagaattgctttaacccaggaggtggaggttgcagtgagttgagattgagccactgtactccagcctgggcaacagagtgagactctgtctcaaaaaaaagaaaaagaaaaacaaattcttaacatcccaacagaatgctgctactaatagttatcaattgcgtatctattgagtatctattgcgtggagaaagcagggctggagagccaatgccatgtattatagctgggccctggaatcaaacttccaggattgaccccttgctgtcctgtttatggctttgtgatcacgtaayctttctgggcctcaattttttcatctataaaataagagtgggccgggagcagtggctcatgcctgtaattccaacactttgggaggctgaggtgggtaaatcgcttgagcccaggaattcaagaccagccagggcaacatggcaaaaccctatctctacaaaaatacaaaaattagctgggcatggtgccacgtgcctgtagccccagctaccctggggattgagatgggaggatcacctgagcccagaaggctgatgttgcagcgagtcatgattccacgactgcattccagcctgggggatgaatgagaccctgtctaaaaaataataataacaagagtaataaaaacaaaatgggattggtaaatgctccatccatgttagccgctgttgttaacgctgttgttattggtttcattagccagccagtgactgtgggaagagtgcaaggttgattgtacccatgtattgggtgctttctgggtccttctcatgtcaagtatgatgagtgagaagtgagtgaataaaacatctcagtggcctgagacatttctcttttttttctttttttgagatggagttttgctcttgtcacccaggctggagtgcaatggcgcgatctcggctcactgcaacctctgcctcccaggttcaagtgattctcctgcctcagcctcccaagtagctgggattacaggcacctgccaccactcctggctaagttttttgtatttttagtagagatggggtttcaccatgttggccaggctggtctcgaactcctgacctcatgatctgcctgcctcggcctccccaagtgctgcgattgttacaggcgtgagtcactgcacccggctggactgagacatttcttatctgtgacttccttctctccagcagtgattcccagtgagcactggtgacttcagttcactctttctcaggaatattttttcctgggtcactacctgtgaactaaagattttctggcttaacactgtgaataggtaaacatttattgatcattttctgttaaccatgggctattagttaagagatctgatctgtcacaaatggaagaatctgccccaacattcttgaaatcccattgaccaggacaatgtttagttttagttagttcagtgcttctgaggagcagggggtcacagagttatgccactggcataaaaaactaaagagaaaagcctgggactggaaatttgcagagcagctccaccggttgaaagttggctttgtttagtgcccaacttcgcagaagattttcctcggctgagtgggcttggcagagccccggcttgagagggttgcttagcaatgagatttggtggcacccaattctcaagtagtcaagcaacccatcaatwccctgcttccccctccactaaacctcagctaccatccagagcctcctattagacaatcaagtgtgtgccagagggagggaccaaaggggtggggtgggggggagtttaatcattgaaccaagcaggctggaggtatttagtccgcaacacctcgctccccaggaggtctgccagcctggactggaagcgtgcaacactccagagtcgtaggagtgaacactgcacaggaatctctgcccatctcaggagaaaccaaacttggggaaaatgtttgcggtccacttgatggcattttacttcagcaagctgaaggaggaccagatcaagaaggtaaggaggacccacgaagctgagagatgcccagctccttcttcacggacaaaactgattcccttaaaaaaaaaatcagaagggagtgaagagagcttattagaaaagatactgggagcatatgaccagtaaaagactcactgagggaagagggagtaattctcccacactcctgggcattgcattactgtcctgaaccttacacttcactcggaacttcctggcaggtattggatgcggaagcgggtgaggagggtgtttggaaagcttgaagaggrttgtgtttgctgtaagggatgtttgctcggaaaggccacaaaggcgaggagaatcattttcaaagaagttttaagaactgttggagcagaaggctgggcgcagtggctcacgcctgtaatcctagcactttaggaggccgaggtgggcggattacctgaggtcaggagttcgagaccagcctggccaacatggtgaaaccccgtctcaactaaaaatacaaaaattagctgggtgtggtggcgggcacctgtaatcccatctactcgggaggctgaggcaggagaatcgcttgaacccaggtggtggaggttgcagtgagccgagatcgygccattgcactccagcctaggggacaagagtgagacttcatctaaaaaaaaagaactgttggggcagatctgtttgttcatgtatttgaaagcatataaatgtgggcagcaagaaggtgtgagttgcaatagacagtaattgaaatatctattattggcacctgctatttgccaatggtacactattcatggtgtgcattattttgtcactttgctcagggaacttgtctacaaaattcattccaaagtgggctggttaaaggttgccaagggtcaacaggagggaaccagggttctttccaggcagctaaaatgagcccagtctgctactctggccacaccggctggctgtcayggccctgggcaaaaagcatctctcaaagtgcagatgacagaagtcctcctagcaggaggacttagccaaggtcaccaagtatttaggatggaatgaggattaaatccaagttggctgactcttccttcaatgctttctgctgtgccatgactccctcctgctttacaaaatgaataaggaggccaggcaccgtggctcacggctgtaatctgcatacactgggaggctgagatgagcagatctcatctcaaacttgaggtcaggagtttgagaccagcctgggcaacatggagcaaccccatctctacaaaacatgtaaaaattagccggtcatggtggtgtgtgcctacagtcccaactactcgggaggctgcggtggcaggatggcttgagcccgggagactgcgctactgcrctccagcctgggtgacagagtgagaccctgtctgaaaaaaaaaggaaagaaaagaaaaaaaaaggccaaggatggtggctcatacctataatcccagcactttgggaggccaaggtgggtggatcacctgaggtcaggaggttgagaccaccctggccaacatggtraaaccccgtctctactaaaaatttaaaaattagctgggcgtggtggagtgcgcctgtaatcccaactactcagaaggctgaggcaggagaatcccttgaacccgggcagcagaggttacagtgagccgagatcatgccattgtactccagcctgggcaacagaatgagactccgtctcaaaacaaaacaaagaaagagagagaggaagtgtggccccttacagccctcaggtacttggtgggataaactcccactaaattctattcatttagagagttgagttagaggttgtagcaaatttaaaaacattataaagcaatcacttgttgattagattcagagccctctactggctacttaaggaggcgctgcctaggaatccactttcttttgttatctgcttagtaaaggcacaagttgcaccatgtctctcccacccccaagggggagcctttggaaccctgaaacctttgattctgcaaacttatttcatttccttgggctcctttgtgttggttaaccttttgtaccctaggatcatgcgggacatgtttgtccaacagccctggtgcaggctcaggagcaccctgtgatgggaaatgcagcctctgctgatgggctccaggtccttctggaaggacagtcagcctttttcaatgcctggagctgacctccctctccctgtgggaggcgagaaagttggaagcacttttatagccaccttaagcaagtrccccaggaagtctctggggtagtgtgggagactggtttatggctgctgggctgagtcatggttctgagaacactcctcccaacacgtggtggaaacacacctggtcaaaaggcacagctcgtttctctgcggtcaggcagtgagtccccttcttcgtctctgtgcttcctgcctctagaattgtccagatcctgggcyagcggtgcctgcaagggttactactgagaccctggaacaatttctaaaaatcttcccataccagcatggaaacaaaaataaaacaaaatgaaaaaaacgaaaatagaaaccactctgacagattcttttccaattcaatatattgacattatttgacctattgatagcaccaggccagacctggtcactgacctgcagattgttcatccacaggagaactgggaggttttcagtgtgtatttttcatggctctgtatgtcaacattacaaaaaagtggaaatgttacttgtaattccacctttaatttacttttaatctcaaacactttcatatttgctgggtggaagccttcctagtttttcttcatcctgtatgtttttagttatgtttataaggtacatacagttctgaactgcttccctcacttactgttacagtgtaaccacttacatagatttcttcattatcatcataattatcattacaatgtcttcttaatatccaatcaagtggatatgccataatgtagttaaccttttcctcttgttggacatttggatactttcgaatatccagagttgtgtaaccattaccacaatctaatttttttttttttttttttttttttgagacgaagtcttgctctgtctcccaggctggagtgcagtggtgcgatcttggctcactgcaacctccgcctccagggctcaagcgattctcctgcctcagcctcctgagtagctgggatcacaggccgcaccaccacgcccagctaatttttgtatttttagtagagacagggtttcgctgtgttggtcaggctggtctcgaactcctgacctcgggatccgcccgcctcggcctcccaaagtgctgggattacaggcatgagccaccatgcctggcctcatttggatactttcaaaaacatttttaataattaaaatattaggctggatgaagtggctcatgcctgtaatcccagcactttgggaggctgaggcgggatgatcacttgcctccaggagctcgagaccagcctggataacatagagagatctgtctctacaaaaaatgcaaaaattagctgggcatggtggcacatgcctgtagtcccaggtacttgggaggctgaggtggcaggatcactggagcccgggaggttgaggttgcagtgagctgtgattgcaccattgcactccaggctgggcaacagagcaagaccctgtctcaaaaataaaataaataaaataaaagtattgttatgttaaaccttggtagagttttagttttatttttatttatttattttttattattattttaaagatggaatcttgctctgtcacccaggctggagtgcagtggcgcgatctcggctcactgccagctctgcctcctgggttcatgccattctcctgcctcagcctccgaagtagctgggactacaggcgcccgccaccacgcctggctaatttttgtatttttagtagagacatggtttcaccagcttggccaggctggtctcgaactctgacctcaggtgatccacccgcctcggcctcccaaagtgctgggattacaggcgtgagccactgcgcccggccttggtagagatttatggttctccatagtcaggattatttcctgagaataggttctggaaatgaaagccctgggtcaaagagcggaattttttatgactctcattcctaatgtgagacctttggactagacgagctctaaggcccctccagctcccaccttctgcaattcagtcttgagtcttgaatgttggatttgctctttctaagtgaaacgggctgctggttggctttcttgcttagacgatatctcccatgatggtttgtgtgtctctccaaaagtgggcttggttttctgcagcaccagtactctcccttagtgcctgggacgtgtgtccctggttacacataccccacatgacttgtttggattgaaaataggtgctttttgtcccaacatatgtttcacttttccmttctaacaactgttcctggtgctgtggcagatacagaagatcaaaaggaaactgttgctgagttgacattctttctgtcataacctcaacttattgaaagagcagcagcaaaccaagtgctcaatgaccccattaaaccccagtcgcaaatgaccccaactgggtctcaaaaaacaggacttacatggcagggataacattgtgtggatgcctggagttttttatactctcaggctaagcaaaaatgatcagtaggttcaggggcactgtctgagagccctttgggtaggaaagaatcaagtttggttcccacatacagcatcccacccttccccaaccccaattacttgggtcacgtcctttgcatccagttttctcggcttgtgtgtggctgtgccaaccaattagtcataaacagccttgggggaacaggaagcccttaatgaagcctgacctggttccatcctgtttctcaaatatgctgaaagctcaattgtccttttttgctaatggctstctgatgattttctggtctttctctggcccccgagtccccggagccatggtaccatttcagtgtcttgggtctgttcgttgtcacgagactgagctgggtcctggcctctgaggcctggctgatgaccgggcccctgtcctagcgcgaaggtaatgtgagccctgtgcatttggtataatttgtctgtcgggcttatgcatccccgacagagctgtgagccaaagccaggccatgggggtgagtgatctagagcctatgttacagtcccacgtagccacagctctgcagccctctcacctcacctctcacctggggacaagaactttggccttacgtggctgcctcaaagggatgctgtggcgatgagaagaggtgaygtacrtggacgcactctrtagacagtagcacgtgttcttcaccctggataaaatgccctttcaccgggaatgtgcctgggatggagcctcctgtcacctggagggtggagagtgctcagtataaaaacagggctggaaaggacagggtgcatatgcccctgtctctcctcctgcccccatcaataatccatcccagtgagcccgggctccagactgccagcaccaattgattagtgttaattagtgtgagggaggaagctttgctgccgtccctgatgtgacatattaccaacaagaggactgattttagccatagtgatttgtataacttccctcctttgggtatggtcctctgtccccgtttcctggttacatgagtgacatccactcattttcaatagcaatctgagctgactttaaaaattcagctttgtcttaactagaacaactcagttaaaccaaaatggacatttatggctgggtgaggtggctcacgcctgtaatcccagcactttgggaggccgaggcgtgtggatcacytgaggtctggagttcaagaacagcctggccaacatggcgaaaccccatctctactaaaaataaaaawaaaaaaaaattagtcgggcctggtggcacctgcctgtaatactagctactcagaaggctgaggcaggaggatggcttgaacctgggaggtggaggctgcagtgagccgagatctcatcactgcactccagcctgggcgacagagtgagactctgtcttaaaaaaaaaaaaggagggaaatttaaagggctagatttaggcattgcttttggaaatgaaatttagctctgagcttcctagcagccagtaaacaaagagaaacctgtctagctatatctgtggtcatcattggatgaaagaaagcttccatgtttagaaatctacgattcaagctctagctggccttttttggtggagaggaatgggacactggtgagggccctgaactgggaatcggaaaccctgaatccttcttagtttctgcctctcccttgtctcatcagaataatgggagaatcattttctcctcagagtctgcccttcagagaagtaactccacaccttctcagccctccattccattctgctttcctaactcgcttccctgtcctctgcctgaggaggggtcagatagggaggctttgggaatccacatctcaatgctgtccccagagtcaggaatgcagcttgctgagggatgtcgggggttacagcctcgactggagggtgagggcccccagcagcaccccttggtggccggtgtctgttccaggtggacaggttcctgtatcacatgcggctctccgatgacacccttttggacatcatgaggcggttccgggctgagatggagaagggcctggcaaaggrcaccaaccccacggctgcagtgaagatgttgcccaccttcgtcagggccattcccgatggttccggtgagtgcagttgtccgctgccagggtccctggctcctcttggctgatgggtgtctaaagtacctaaggtttgcccctgtaccttggcttctctctctagccctctctctgctgtcccaccctccctgcccctctctgcttcagtcctgctgaatccctcttgcagttctgcagttctgcagccccaggcaccktggcttctctgcccatcgtggcctcacacatttgctccctctcctcctggagcatctccatgttcttccctggtgagtatcaacgtggcttttccgtctcagcgtagtggtccctgcctccatctaggaagtatccctgtgctgggctgggtgcttgtcagggcacttgtcactttgctgtgtccccactctgagtctccaccaaattaaccactcactccgtgggtccaaggtcttaccacagtgttcccagcacctagtgtagcactgggaatgagtaatgggagcaagaatgatgtagtggaaatcacattcaatgataattcaacaaacctgggtctgaggcccagctctgtcactctcagtgacctgaggcaagtgtttagcctcagtttgcccagctgtagaatgagaaatggcctatgtatctgtttcctatggctgctgtgatgtattactacaatcacagtggctgaaaacaatcgaatatattctctgacagttctggtggacggaagtttgcagtgggtctcactgggccaaaattcaggtgtcggcagggctgcgttccttctggaagcttgaggggagaatctgtttccttaacttttccagtttcgagaggccacctgcatccttgaggcatgcccctttctgttctcaaagccagcagtgtagcctcttcaggtccctctctgacctgaccttctgcctccyttcaacatttaaagatcctgtgatcacgttagtcatgcttagataatccaggataatctcccaacttcaaggtcagctgatgagcaattttgatcccatctgcaaccttaattcccctttgccttgcaccctcagatattcacaggatctggggattaggatgtgagcatctttgttgggggtgggggacattattttgcctacaatggcctagaaatctgtagataggatctatgaggtcccatccaactcttccattctcagcctctgaatgaagctgtaagagggaaaagggctgctactggcctggagtggtggctcacgcctgtaatcccagaactttgggaggccgaggggggcagatcacttgaggtcagatgctcgagaccagcctggccaacatggtgaaactccacctctactaaaaatacaacaattagccaggtgtgatggcatgcacctgtaatcccagctactygggaggctgaggcaggagaatcrcttgaacctgcaaggcagaggttgcagtgagccgagattgcgccactgcactccagcctgggtgacagagcgagacgccatcaaaaaagaaagaaagaaaggaagaagaaagaaagaaagaaagagagagaaagaagaaagaaaggaaagaaagaagaaagagaaagaaagaaagagaaagaagaaagaaagaaagcaaagaaaaagaaagaaagaaagagagaaagctgccatttactgagcaaccactgtggtcatggggtgctggggactcgctgagccacatatttcctgtgacaaccctgtggtgtggctgttcagacagaaccaccaaggaccaaggggtttctcccatgtcagggtcccagtgcccaaaccgagctcgtgaaagagcactggggctctcgcaggagcagggtctgaggtttgggagctctcagggggctttgatgggatcagtcgtgttctggacctctctggagcaatgcctggatcaaggtagcttggctctgctggttgagaggccctgggacactgcactgggaaaggccctgtgccctcacttgtgggtaggtgcttgggatggacagtgccctgtcctggaaggaygytgagcttcrgagagagacagccctactttgaaatcttggctctgtccttgccacagcttgacgagagtactgggacgtgtccttgacagggcatctggggcccctgggaggaagcagctgagtcatgtggggagcaccagggctaagtccgcctggcttcctggactgcagcccctcctcctgatacagacaaggtgtgtccccagaagcaagggaaggtggcctttgatggtctggaggctctgggacaggcggtgtcctcctggccctggctgcttctgaaggttcagaagtgaaactaactaagtcatagaaactctctcctccttagccgggaagacgcccagctccccatccccgtctccgcagagcctctcaccacacaaagcatctcaccagtgattctgttgtgccgaggtccctgggcccagagtccctaataagccaggtgttcttggtaaatcccggcaccatacatgattgtcaggatttaatgagatcatgtggatggcgtgctttaacatctctaaaatcttgtcccaagtcctcctagctcttgtgagctggtggtataatttcatgattaccgacaaaaaacaarcaaaactctcctaattccttatggtgtccgtttcagaaatgtatgcagcttccagagaagtcctgagtttgcctactcccatcaggacctatctgcgagggagtcacctgtttgagccttagttaccacccagccttttggtcagggggctkcagtggtctgttctgacaggatcaagtgccttaaaagtgctgtgttaatactggagccttctctgccagtcatggaaggggcatgggaagcatgagggtgactgtgattctttggcttgacccctgctggctctgttccaggccttagcctccagtcagcctccaaggccaaataggccttgggggtgagcccgggagccctgaggtcgtcagcctggagcctcgagtgtttcctaatacacactttcccagcccctccccctggggactctgaatctccaggaatctccgcattcagccactgtgcacctttgggagactctgcactgggtaaaaggagggagtgaaggcaccagcaccagcagtgacttacgagaagggaaccattgggtccaaggcagttcatggagggtcctctggagcaggcagattggccaaagcaatttaccccgcttaggacactgttttctcttttctttctttttagaaacaaggtctccctccgttgcccaacctgcagtgcaatggagccatcatagatcactgcagccttgaccttctaggctcaagtgatcctcctgcttcagcctcccaagtagctgggactacaggtgcatgccactacacccaactgacttttttgtcttttgttttgtagagacagggttttaccatattgaccaggctggtgttgaactcttggcaagggattaattctcctgcctgggcctcccaaagtgctgggaccacaggtgtgagccaccgtgcctggccggggctgttttcttgatgtctgtgaagactctgaggccccacagactgctgttgcctgggcaagtcctccctctcccagggtccactggttccttttttctggggtcagagacagaagggatcacaccgtgtggcatccatgaaatggcacctcgagccactggtggagtgaggtgtttgatagtgattgcgatgcgggccgggagtgggatgcctccacaccgacactggccaggtctcagcacatcccctcccgtccgatggcagtgcagcagcctcttcttttgttaaaccctcagtctattctggttggtgtcagaggcatttgtccccagaatctcagatcttggcactccctagcttaaaatctttctgcagctccctctcaccttccagataaagcccaagctccttggggtggatagcttttccaaatccttccaaatttaacctgagagccaccttccaacctcatttctgtgacagctgccctcctttggcaaaagcacactcactcytakcggatgctttctyattcctttgcccgtggttcctctccctgggacccccgctcccggcagcctggcagcctgactcctgctcacccttcaacactcagctctgtgtcccctccctgcaaagccagctgcctttgtctcccagctttgacctggatatctctccctgtgcctctcacaatctgagcactggtcctactatatggaaatagctgatttatgcgcctgtatttcggatcaatttcccagggagcacaccgtctttcatctgcgcatccctagcacctaacacatgttactcagcacagagtagatgctcagtaaatgtgtggacatagattgtgggatctaccctacctcctacacagcaagacagcatctgggagaaccctcttacttggtgcataatatatactaataaaagttgcataggattaactccctgaattccctcaccaaataataaatgactccatcagctcctttgtggctgatctgtgaaggtaagaatttccggatgtctacacaaaaacaaaaaatcgagctggctgcacctttgctactctaactatggtctacagaccagcaacagcagcaacatcaccaagttggccaggctgttcttgaactgctgacctcaggtgatctgcccgyctcrgcctcccaaaatgctgggattacaggcatgagccactgtgcccagcccccacctttcaattaatggcatctgtcttgggctgggctgggttgtgttccaatgtctccttttggagtggctctggcctaaaaaaatcagcatccttggcacctcaagggccattgtttagtccctgtctcctctcccctccaggartgttttccctctgcccataggatcatcggctgcaggaggctggctgctcctcgccgcacatcctgtcttccccctcatacctttatccgagtttccccaggctgggagcaccagctctctcttcccagtgatggcatcccaggatgggctccaccgtcgaggccacctctcataccaccgcaagggctgtgctcacatttgccytctccagttgacatgcacattcctacagcatgagccagtgggttgggctcaggctgcagagtcaggctgacttagttcacatctcagctctkcgccttacctcgagggctctgagaaatggccagagtcctcagccttggcaaatgagcataatgatacctartggctgtgatttgaagacgttgattatatgtccaacctctaatgcagagcttgccatatctgtagtagaccctcaataaatggaaactgaatttgtttcttaatagaaaatggggagttcctttccctggatctcggagggtccaagttccgagtgctgaaggtgcaagtcgctgaagaggggaagcgacacgtgcagatggagagtcagttctacccaaygcccaatgaaatcatccgcgggaacggcayagaggtacctggcaggtggctcctgtgaccgcagggaaggcggtggcatccrtgtgtggggaaaccacaccttagcccatgtactttgctttctcttctctgcagctgtttgaatatgtagctgactgtctggcagatttcatgaagaccaaagatttaaagcataagaaattgccccttggcctaactttttctttcccctgtcgacagactaaactggaagaggtaaggcgcggagggaagcagcwgtgcaggaattggggcttggggaatgtgggcacgggwgggagtcaggctgcacgcagragagaacagcaggagctttcttgtttgtctttttcttttctttttgttcatgatgaggtggcagcgtgaggcagagaacttgttaacgcaatggccttgattttatgattaacgtgggcacagctcgggggagtagaatgcttttcactagctctcaaaccttggtgtgaggaattccttggagggcttgttttaagcacagattgctgggcctactggaatcagtggttctgcaaggaggccctaaattcgcctccctgacaggttcctggcagatgtgatgctgcctgaggcctgcacttaggaccactgacatagccaactagaagaaacatgggaaggctggggagtctctccctgtagtgagccctcaggaggaggattagaatgggggcactggaggaccaggcgcggtggctcacgcctataatcccagcactttgggaggccgaggcgggcggatcatgaggtcaggagatcgagaccatcctggctaacatggtgaaaccccgtctctactaaaaatgcaaaaaattagctgggtgtggtgccgggcgcctgtagtcccagccacttgggaggctgaggcaggagaatggcgtgaacccgggaggcggagcttgcagtgagccgagattgtgccactgcactccagcctgggtgacagagcaagactccgtctcaaaaaaaaaaaaaaaaaaaaaaaaaaggaatgggggcactggaggagtgasaatgtcctggagcagacacagagcctgggatacacagtctsaactgtgtcaccagctaggccggggttcctggtaactcatctctgtgtgtctcagttttcaatctgtaagcaggaggaagctaacccaatcttatgtgaataaagacagcaaataaggggacgttctggggccaggttgggggagttactgtcaagagtctagtctccccgggccactcctgtctgggttggggaccctgatcaatctcctcctcctggccctcctggttatgatgcccagttgacagtcacatggacctccttgggatgtgcttgatattgttggcttgagtcacttattggtgtggaatagtgaaagggaatgagctttcatgttccayacacatggctttgaatcatggttcaggacaaattgtgtccccttggaccagttccttaatttcatgagcctcttgttttctctttgagaaaattttatttatttttatttttttctttgtagagatgaggtctcactatattgcccaagctggtctcaaactcctgggtttaagtaatctgcctgcctctgcctcccaaagcgttgggattacaggcatgggccatygtgtcccaccttgttttctcatttgtaaagcagggataataacatctgcttgttgggctgaggtgaagcttaggcaaagcatttgtaaagcatccaacactgtggttgggccttacacagtagctgctaggctgtggtgactgtccctggattacttgtctctttgtgcttttgtatcttatccctaaattcaacagaggtttttggagggcaagcagtgcccgccaagggcacagaccttccccgccaaggtctctgacaatgtgttgtatttaataggtgcttgataactatctcacagttgaaaggtgtcaatcatttatttgattccatcgtgggaatttgccatcatctatacaggggacaggctgagttttactttttcattcttttataaagaaaggactgagaaaaataatataaagaagsttccaggggcctggcgtggtggcttttgcctataatcccagcaccctgggaggctgaggcgggaggattgcttgagccagggagtccaggctgcagtgggctgtgatcacaccactgcactccagcagcgcaggccacaaagcgagactccatctctaaaacaagcagccagatgcggtggttcatgcctgtaatcccagcactttgggaggccgaggggggcagatcacctgacatcaggagttcaagaccagcctggccaacatggtgaaaccccatctctattaaaaatacaaaaattagctgggcctggtggcgggcgcctgtaatcccagctactcgggaggctgaggcaggagaatcacttgaacccacaaggtggaggttgtggtgagctgagatcaygccactgcattccagcctgggtgacagcgcgagactctgtcagaaacaaacaaacaaacaaaaaacaacaacaagcaaacaaaaaacaaacaaaaaagtttccagggaatgtttgggtgagaccaagtggagctggctggcagagaaaggtccyaggagtgagtagatgtgtatgtcagggggttgggaatcagggccctggctggatcctgtagtgcaggtggtggagtgagagtgtgccagctgctcttattagagagctctggaacagagactccaggaagaaggaagaaaattctcaagctctgtgagaattcattcaactttaagaattaaatgcacatgctttcttgatagcttggcagcggagggtgtgaacggatggtttatccatccaggattttgtcatttatctatgttgaatacccaccaacatctttctcaataataatgataaaagcacgtgcctccggttttgacactgtacctcgcgctgtgccaaatgctttatgcgcattatcttgttaaatcccccaaacaattctaagaggtagatatgattatcttcattctatatttgagaaacactgcagctcagcgaggttaagagacttgcacaaagccacacaaccaagagtagcccaccccaagttcataagctccccaactacagtgcctttccagaaagacaccactttagaacttcatttaaaatggcagcaggtgcctgaaagcattttgatttttttttttttttttgagctctgtcgcccaggctggagtgcagtggtgtgatctcggctcaccacaatctccgtctcccaggttcaggcaattctcctgtctcagcctcccgaatggtggtattacaggtgcctgccaccacacccaactaatttttgtattttcagtagagacggagtttcaccatgttggccaggctggtcttgaatgcccaacttcaggagatcctcccgcctcagcctcccaaagtgctgggattgcaggcgtggtgagccactgtgcccggcccattttgacccacttagtgtcatattacaataaagatttttcaggtaaaatttaaactaaggaagggcatttaattatatcaaggagaggccgggcacagtggctcatgcctgtaatcccagcactttgggaggccgaggagggtggatcacctgaggtcgggagttcgagaccagcctgaccaacatggagaaaccccgtctctactaaaagcacaaaattagtcgggcgtggtggcacatgcctgtaatcccagctactcgggaggctgaggcaggagaattgcttgaacctgggaggcggaggttgcagtgagctgagatggcgccactgcactccagcctgggcaacaagagtgaaacttcgtttcaaaaaaaaaaaaaaattgtatcaaggaagggaaaaatgctttttttctcatcgcagtctagtcaaatatacttatattttataaaatttcctcgcaaactgcctttcaataaaatctaaagttaagtagtaaagttccaaccacaagaaaactcattcctgataatatttgaatgtggcctcatctggcaaagctatttaagcagggctctgctgcaggagtgggttcggtaacactagaataagggctcctggggaagatgggctctgttcagctccatgactgcagagggatggaaaggggaaggctgtgtgaggaggtgtgattagggggcttctttgagaaactgaaaatgattaaagaaggtaggagcgtgagaattcttattatgtttaacccatagccaacatcatgagcataagaattaaaggaagtcacttggttttttattcttgtttttgagggaacagaaagtcttaaccaaagagaaatttctttktstgtgtgtgtgtgtgtgtgtgtgtgtgtgtgtgtgtgttttctgataataaaataaatggtaatacttttttcaaggtttaaaaaaagagagagagaaggaatggaaaagtttaaagaagaaaatagaaatcaccactcatctcaatattcaaatattcccaccactagaattgtgggtttttcttttactcatacctatattaaatacaagtgttatcctgtatctacagtttagcaaatctatggttgattctagtcaccaaatatttgagacaaaaagaaaatgtacagttgtatgtaattgcctttttaatttaacattctatcgcaagcatttatccctcacttcccccatccaccttccctgcaacagggatttttgaagaaagccagcctgtgcatctctccccgctctgtccctggagacagggatgttgtcatagcctatgagagcagaagttagggagarctgccacacggcggcgctgtggtgcaggaaaaaagcccgagggctggtccagagtcagagacctgcattcggcttgggctctatccttcactcgcggtgaaattcagagcaatttcctccctctctcaatcccagcgtttttaaatccataaattgagggaaatggaggaggtgcggtcaggaagtttgtgagcctgggtcagctgctcttgactgagacgacttgggcgattctcttttaacttccaagttctcttccagtctgaaacattctatgattatttgcgatttcagacacgaaactcaggaaacaccatttgtaagcaatgattggtaatgcaaattgagaaccatttttctttctttctctttattaagagaygaggtctcgctatgttgcccaggcaggcctggaactcctggcctcaagtgatccacctgcctcaggctcccaagtagctgggactacaggtacgggccactctgcctggttgggaatcatttttctaagttgaaatgaagttcctgagacaatcctgcaaggttacaccatgttagttctgttttgtggacctggcaaaccatgcattctgcatgtataatacaccaggtattttcttttttttttttgagacggagtctcgctctgtcgcccaggccggactgcggactgcagtggcgcaatctcggctcactgcaagctccgcttcccgggtcacgccattctcctgcctcagcctcccgagtagctgggactacaggcgcccgccaccgcgcccggctaattttttgtatttttagtagagacggggtttcaccttgttagccaggatggtctcgatctcctgacctcatgatccacccgcctcggcctcccaaagtgctgggattacaggcgtgagccaccgcgcccggcctacaccaggtattttcattagagcattcctttgagagaggtagggaggtgacatttccactttgcagaggagtagactgaggctcagagaggttaaacgacttgtctaatgtctcatgaatccaagagctctaacttttcaataattactccttctgctaccatatatttcaaaccactcagatgagagtaatagtcctttaaattattagaaaaggctgcagaagcaatgttttaaaaaaattggggtgattcagcttagagaagagaaggccatgggggatgcacgtaggcatgaagtttctgcrgctcagttgcacatctcagcacgtctttcattcaaactggacctgaaatcttctcccagggtgtcctactttcgtggrcaaaaaagtttaaggcacgaggagttcaggacacggatgtggtgagccgtctgaccaaagccatgagaagacacaaggtgaggaattcacctyggtgtgggaggctctcccagccctagctcctttctcttgggttggtggggctgggggtgaggtgagggggtcacatatggtgcctgcatggagggagaatcagagaaggaattgatcttagaaaaggtcccactgtagtacagatgtggccaacttggatgaacccacagagccttggtaggcggggcttgcaccaatccctattgaaaggtggccagctcatccctgggcctcyccagcagccacagccctctccggaggtcttggttagatctgatgctgtgtgtaggccccacacgccctcctctctgaggctgaaaagatcatatactttccgggctggttccatattctttctgggctggttctctatttcactgtccactccctgtccattaaatatccctatttgttgaacgtattttacaataatttaaactactgcgaaagcaagactcgctccttgctgagctggaaagtacacaaacccaaattgcttgttgccctgacagcaagaggcatgtttgctgcatagccttccagcctttttttctttaaagctgggatcttattgttttatagcctgcattttcccttattgttttcattttactttttttttttttttttttagagatgaggtcctgctgtgttgcccaggctggcagtgcctggcactccatcctcgaattcctaggctcaaatgatcctcccacctcagcctcctgcatagctgggactataggcataagccacatgcctggctctcattttactttaaaatgttcttccaaactttgggggatgttggtgcaataacccaagctgacttggcagaacaggaaatccagacaggaagtcaccatgccatacatggggaagacttggccgagtctgtgcctgctggctgagttgtccccgtgggtgaggactttggtgttttctcctggaaatgccactggataaacatgctttcctcaatgtcttcccaggatctcacaaacaaaggctgaaacctgggtgtgatgtgtgcctgtagtctcagctactcaggaggctgaggcaggaggatcacgtgagcccaggagtttgaggctgtggtgtgctatgtttgtacctgtgaacagccatcacactctagcctgggcaacatagtgagaccctatctgcagattaaaaaataaaattttttaaattaaaaaaaacatcgacaacaaaaaacaagggctggagtcccggtggcctgtccctcatatttccattgcagaggccttcacccacaaagcaagaggatgggctcccctcttcagctcctgtcggctctttctctcccctagaccctgaaccttgatgaggccttgctccttcagacaggcccagcaggcaggatctagggatgtctcagcagccaccttcactacctgctgcctctgtggggaaggagggagggaaacacctccttcccacccgctgattccctctggccttgtgttcggcaggacatggacgtggacatccyggccctggtcaatgacaccgtggggaccatgatgacctgtgcctatgacgacccctactgcgaagttggtgtcatcatcggtaactcaattggactggttttttgagggtagrkgagaagggactgtttgggagtttcatttcagcgagctctgagtgaattcggcgggaagggcactgcactatttaggagaagcaacatagggacatgaaaaattcattcattcatccattcgacaagtgtttactgagcacccattgtgtgccggcccctgggcttggcactgggtttggagtggggagttcctgtgctcctggaactttcagtggggaggtgggtgagaggcccagaaggcctaggctattaagataatttcaggtggtggttagcgtgataaaaaaacaaaaaacaaaaaacaaagagagtgatgtgactgtgagtgggatgaggcgtcagggaagcctctctgaggggtggcatttgagccgggacctcagtgatgcaaaccagggagcaaggtggaggcccgagggtagggagtccctgccaaaggaaagaggacacctacaggcttggagatgggaaggggtccagggagggggcactgggggaaccctatagccgagtggtgtccggatgaggtgagtgaaggctgagagtcggaggccattcaagtgagaggsagaggacagactgggcagattgcacaggatgtgcacacagtcactgtaaggtcaccggcttatcccctgagggagactggaaggcactgggggactctgggtgggggatggataaatggatgcgcattttattttatttttttatttgagacggagtcttgctctgtcgtccaggctggagtgcagtggcacagtcttggcttactgcaacctctgcctcccaggctcaagcaattctcctgcctcagcctcctgagtagctgggattacaggtgcccaccaccacggctggccaattttttgtatttttagtacagatggggtttcacagtgtttgccaggctgctctcaagctcctgacctcaagtgattcacccgccttggtctcccaaagtgctgggattacagccatgagccaccacgcccggccggatgtgcattttttaaaagcccattttggctgctgtgtggataatagattactggggacaagagtggaagcagggtgaccatccaagagaccactggactgtcaggcaaggtgcactgcagctgtggaccagagaggtcgtggtgcagtgggggtttccagtgggtggtctccacaccagagcgagggggtcagctggaggaatgtgtgggaaggcagtttggggtacagtaaagctgaatggctctgacttataggttgttcttgaatatccccttctccttttcccattcctttaccactcctggggaaagttcttctgaattgctttttcttaatgtccctcaagaccctcctcagcctggctttcccaaagggcaggtttttaaacctgaggggctccctccacccttctgtttccaggagcctcagaatggttcaggcccttgccagtcatggcacccgcctgtcactgtggctgcgtctggtaaccacagattgggggggccacgcctaaacagtgtccgtgcatttctgagaaaagctttttccaaatattacattctgcttttctacatttctcattttccatgttggcatttaaaatactcataccagagtatcagccaagggaagatactgaagaaaaaaaaaaaaaaaaaaaaaaacccgaaaattcaaacagctttattgaggcataaaagtcctccgattttaggtatacgattcaatgatttgtagtaaacgtatagttttgtaaccatcaccacaatccgattttagaacatttctgtcctcccaaaagagtccaaaaagatggtgcccacttgcagtcattccccagtgctcaagtgtttgaggcatttccttggagcgattttgtgtttgcataacggaatgttgctttcttaggtggtagctaatcacagtctaagataaggatgcagcttatgctagaaacaatttgtggcaggccataagtaaagaatatttttagtatcaaatagagaggaagctaagtagcttaaggaaagaattttcaaaattaccctgggttggtgattttttgaaaaaaatatttacaagattatcttcatttgtcctcttgtaagagcgcttcgtcagctttcatccatattcatcagcggacttcttcacaattgactccattcagaacagcaaaccctgagcaccctgagaagtgcagacttgacatgtcagctgttttccccatgtgcttggggcttgcccaagctgcttccctcagcgagagccagcccccagggaatgaaaagcactttgtggtacattgaggaggactccccagcagtcaagagttctctgtctgtgcccagctgggagtcctctctctgcatattctctctgatccctggttcaggaactggcaccaatgcgtgttacatggaggacatgagcaacattgacctggtggagggcgacgagggcaggatgtgcatcaacacagagtggggggccttcggggacgacggggccctggaggacattcgcactgagttcgacagggagctggacctcggctctctcaacccaggaaagcaactgtgagttcccttctggtgttatctgggcatcggcaccaggcagtgcctaatcactcaggtcccctggctacctgggaggctttccagttgtgactagctatccatcacaactttctttctttttttctttttccttttttttttttttttgagatggagtctcactctctagcccaggctgaagtgcggtggcacgatcttggctcgctgcarcctccaccttccaggctcaagcaatcctcccacctcagtctccagaggagttgggactacgggcatgggccaccatgcctggctaatttttgtattttttgtagagtcagggttttgccatgttggctaggctggttttgcactcctgagctcaggcaatcctcccgcctcagcctcccaaagtgctgggattacaggcatgagccaccatgcatggccccattacaacaaatttataaggcattgcttgtatttcagtttcatctgacaaatgaggaratagaagccaaggacattgaaagatttccctaagtcataaccctaataaccctaattctaattcagtcagtatttgtgggttacgtatgtgcatgataggcactgaagataagagcactcggacgcttggccgcagaacacacctgggcagtgaggagaaggcaggcacagccgaactcgtcgtgttcgcatgtcccccagccgccttgctttctcggaggcctaatcactcagcaagtggtgactctggcaggaccttccctctgtgtttgctgtccacaatttttattttgatgctcaaattgtttcagatttggccaaaggaagcctctgaagctgcctcctgtgtccttttgacatgttccatcactctttaagtacttccttatttcctggcaccgtaagacgttcccggctcatgtcgcactttcctagccccagccctggaatcagccattttgtcaagacatgctggtgaatttcaagcaccttctaggagcgattcaaacactagaactgtgcacccgggaagcacattccactttggtggcacctactccaggcacatgcctgtgctctagtgacccattgcagtcatgtcccaaggacgtggtgtccattttttgaattttatcatcttcacccatttccattttacttaaaataaattctattccttccaggcctggtggctcatgcgtgtaatcccagcactttgggaggctgaggtgggaggactgctttagtcctggaatttgagaccagcttgggcaacatagtgagaccagtctctataaaaataaaaattaaaaaaaaaaattagtcaggtgtgatggcagatgcctgtagttccaaccactcaggagactgaggtgggaggatcacttgagccagggaggtccagggtgcagtaagctgtgatcataccattgcactccagcctgggcaacagagcaagaccctgtctcaaaaaatatatatatatattatattccctgacatccaccctaaatttcttttgattgtcttctgtttcttcaatgctcaaagacttttttttttgagatggagtctcactctgtcgccaaggctggagtgcagtggtgcaatcttggctcactgcaacctctgccttctgggttcaagcaattcccctgcctcagcctcctgagtagctgggattacaggcatgcgccaccatgcccggctaatttttttgtatttttagtagagacagggtttcaccatattggccaggctggtctcaaactcttgaccttgtgatccacccgccttggcctcccaaagtgctgggattacaggcatgagtcactgtacctggcctgttctaagactttttatagtgaactatataaagtagattgtgacatagattgttcttgattttgtgtcttattgtgtttggaaaataagcattatatttaggcctgatgcggtggctcttatctgtaattccagtgcttcgggaggccagggcaggagaaacactggaggccaggagtttatgataagcctaggcaacataattagatcctgtctctacgaaaataaaaaaattagccaggtgtgatgatgcacccctatgggaggctgaggcaggaggatcacttgaggccaggagttcgaggctgcagtgagctatgattgcaccactgcactttagcctgggtgacagaacgagatcctgtctccaataataataataataataataataataataataataatgttcaatagtctgcctgggaaacaattaggaattgttggtgtgcagacttggagtaaagctgtaggtagccatggcaatgttaaatccacattgttgtagagcctgtctggggctgtccaagcccatctcacaagcacagcatctttctctcttggacagaagcttgatgtaggagtgggaagcatctgagtgtgaaatttgacttgtcgcatcrtgtttgagtgattttgggaaaatacccaaagtctgtgaaattgagagtccctatgctcgatgtgagaatggtacccatggccagggtgatttgagacaaaagttcttgccatccagcactttgcgagaaggagggaatcttagctcagccctctcccatgtgctccttcctgtgggcagtggctcctggtcttcgggaaatgatgcagcttaatcaaaggggctgcrtccacagatctgttcaccaacctgcaggttcgagaagatgatcagtggcctgtacctgggggagcttgtcaggcttatcttgctgaagatggccaaggctggcctcctgtttggtggtgagaaatcttctgctctccacactaagggcaagatcgaaacacggcacgtggctgccatggagaagtaagcaagtccctctgccttggctctgtggagggctgggatgggaggcccaggtgtggggtgctccatgtggtaggacagcaggagggactagatcctcctccttcaccaggaagatttcagacctgggcatggcttcagatgggttagcaatttctgccatgactcagatgagaggttcttgttggtttcatcagtgagggactctgctgtcagagggccaccctcttcccatgttctgttgccttcttgttaaagtggtaacttgtagcatttttaggatcacagatccttttgagaactttattcaggttctagacccttagccccgaaaatgtacattcacacacaagtttgcttacaatatcagggcatccttggacactaagctcattgtggaatccaagtccagaactcctgtgatagcagagccttctccacctgctcccatcaggaactggctttgaatgtggtgatgtgaggccttacacacaggtccctcgcatggagctggctggtgaaggctgcaggtgamggcggctggccccggtgtgactgcattgccgtccagcacatctgagggtcctgctcctcaggcttagaaatcttggcatcgccttgactttgtgatcagtttagattctgagctcagccacgtggcgctgacctgcagcatctatgtctatgcagaacttggcagggacagaatttccgtgaaagtcagcatagcacagggtgattaaaagtgtgggtgctagaatctaactgctaagttcaaatctcggctctagcccttactagctgtgtagccaaggacaagttactcaacctttctgcactcacatctctcatctgtacgayagggtaatgacggtgcctcccgcaggatttttgtgggcgttgaaggagttactatgtgtaaaatccttagacaagtacctggctcatggtgactgctcagttagtggcagctgctactatcaatgttgatattgttatttttattctataccatggacctgcctattaattttcacaatcctgagaggtggagaagcttgttcccccaggaggataccagtgggatggagaagtgtcgttcactcattcctgtcccctggccaggtataaagaaggccttgctaatacaagagagatcctggtggacctgggtctggaaccgtctgaggctgactgcattgccgtccagcatgtctgtaccatcgtctccttccgctcggccaatctctgtgcagcagctctggcggccatcctgacacgcctccgggagaacaagaaggtggaacggctccggaccacagtgggcatggacggcaccctctacaagatacaccctcagtgagtgctgcctgccatccacgcccccacaaatgagtctccctggagcagggccccagtgtcttctggactatcctgcctatctggggtctggaaccaacaaccyctcttgttggttctgagattacaagggaaaaggtgaatccagggcctgcattcatctagctggctgggttgcttttggggattactcttaaagaaatattctgctaaagccaattgcctaattaggaatgctgtccatccatgtatctatgtccacccatccatcacccgcccattcatctctccattcattcttccatctagccattatttactgaacacctactatgtggttaaggctgggaagtaagatacacctagtcatagatggggaaaaatagagatggcacaggttgccaagattatgggaagggtcctggtaggaaaacacagggaaatgggaattttccagaaggaaggagagtgaaagcccctttggctaccggggtggacttggaagtcaagtggttacaccctggaaagagctgagaaagaaaatccttctctttggacagaaatgatgttcagccaatacattatgcacagactggttgaaatgttcgttgacagaataagcactccccgagcctcccaagtgccttccactgccccagcttcttagtccctccctcctctcatcccctcccctccctaccatcagcaaataaagggctgagccccgccccgcagggccctccgggactgggtttactgctgcccctgggtctgtgcctgagcctggcctttatgattgctaaatattttgccatcacccctgcttcaggtacccaaaacgcctgcacaaggtggtgaggaaactggtcccaagctgtgatgtccgcttcctcctgtcasagagtggcagcaccaagggggccgccatggtgaccgcggtggcctcccgcgtgcaggcccagcggaagcagatcgacagggtgctggctttgttccagctgacccgagagcagctcgtggacgtgcaggccaagatgcgggctgagctggagtatgggctgaagaagaagagccacgggctggccacggtcaggatgctgcccacctacgtctgcgggctgccggacggcacaggtgggccagcacagcctccctctctgaacagccatccagggctcccgtcaaaactccttaaagccagtgaggttcttggtttttagaaacttgggttcacgtctctaatggagggcaagagtaagaagaaggctagtattctttctaaatctgttggcctttgttaacccarggcatttgcagtaaaaacaaaacaaataaacaaacaaaaacacaaaaarcctacattaggttatgtgtgtgcacttatgtgtgtgtagatgagaacatgagtgtaccccccccgacccccagatcctgaccccaggaactttgttttagatgcctgagattgcctgggcttgtcttcctgctgcttctctggctctgttctcttctgcagcttggctcacttccctttccctctcattgcttctgcccccaacttctccaacccttgatccttctggtcctcggtgctcagccaaaagaagccactaagtagtgaaatcagttcttcagacaaattattttacctctttgaatctcacgagactcttccggaaataatgaccttagtaaaatgctttacatcttataatttgcttttgaacctttcatttcatttcatcctcacaaccacttggaacgttaccaaagaggaaatggttcccattttatggatgccatacctgagacttacagaggctagatgacctactcaaggtccaacagctgtacttgggatctcttaactgagagcagtaaaagacactgtttattttatttttatttttattttttttgagacggagtcycgctctgtcacccaggctggagtgcagtagcgtgatctccgctcactgcaagctccgcctcccaggttcacaccattctcctgcctcagcctcccgagtagctgggactacaggcgcccagcaccacacccggataattaattttttgtatttttagtagagatggggtttcactgtgttagccaggatggtgtcgatctcctgacttcgtgatccacccgcctcggcctcccaaagtgctgggattacaggcgtgagccaccgcgccagaccggaggccccttgagtataagaatcatkcatttccttgactggatgccctgtaccgttccttggggctcccgagaaggctgtcagtcagtgaagctgaaagagccttcagaggttcagtctcctgattttgcagatgtggaaggatgggaccttgcctctcttgctcaagataaaaagccatttctcagaagccccaggtcccttgactccaggccagggctcttttcacggcacctcactggcgatagtgtaggtggtgcctgggactttaccacagaagtggaggccaaggaaagcagcctggcctcacgcaggctcaagatgcctgcccggggcccrggcactgtgcaggrtggcccccacgaccctctggtctatgaggcccaggagtgcaggccctgggtccgctctgctccgacgtctcctcttcctcccaatgccccgacacaagtccstgtcatggaatgcagcygctgctttctccatcacagagaaaggaaagtttctcgccctggatcttgggggaaccaacttccgggtcctcctggtgaagatcagaagtggacggaggtcagtgcgaatgtacaacaagatcttcgccatccccctggagatcatgcagggcactggtgaggaggtaagtgccaggcaaggcctttgggctccgaggtgccagcctgccaccctgcatcgatgtcygcctggtgtgaatgcsgctctytctctctctgcagctctttgatcacattgtgcagtgcatcgccgacttcctggactacatgggcctcaagggagcctccctacctttgggcttcacattytcatttccctgcaggcagatgagcattgacaaggtaagatagccccaccaggctcacggccagcccagtgggcttccttcctcttctgggaccatctccaggtaactcccagcctgccttcatttttacagggatcttgggttcagggcagctgggaacacatgatagagaatttcaacaatttaatttttaatcaatttatcacgattttttagactgaccattcacaagagaatttagagtagtatgcaataaagggacacgtgcataatattcctactaaaagagaggtcgaatcatattatggagagagggagaaagaggtaatgtccagtgaaggccagttataacaattgggcagtaatacgatctgtgtctttctggacagccatgtaaacagggaattacaatgggtttttatcgtctgatgaaagaaatcttgccagcacatcacaagaaatacatttcttttttttttttttttttttttttgagacagagttttgctcttgtcacccaggctggagtgcaagggcgtgatctcggctcactgcaacctctgcctcctgggttcaagcaattctcctgcctcagcctcccaagtagctgtgattacaggcacctacctccacgcctggctaattttttgtatttttagtagagatggggtttcaccatgttggcaaggctggtcatgaactcctgacctcaggtgatctacctgtctcggcctcccaaagtgctaggattacaggtgtgagccaccacacccggcctactttataagttttgaaatcaggaaatgtgagttctctttcttcttattcaagattgttttggctattcggcactccttccattttcatatgaattttagaagcagcttgtcaatttctgcaaagaagccagctgagattttcataggaattgagttgaacctatatattaatttggggagtttgccaccttaacaatagcgagttccaatccatgaacatgggatatctttccattaatttaggtcttctttattttctttcaacaatcctttgtagttttcagagtaaaagtctatacttctcttgtttattcctaagtaatttgtgctttttgatgctattataaatggaattgttttcttttcttttttttttttttgagacagagtctcactctgttactcaggctggagtacactgatgtgatctcagctcactgcaacctctgcctcccgggttcaagtgattcccctgcctcagtctcccgagtagcttggattacaggtgtgtgccaccacaactggctaatttttgtatttttagtagagatggggtttcaccatgttggccaggctggtcttgaactcctgacctcaggtaattcacctacctcagcctctcatagtgctgggattacaggcgtgagccactgtgcctggcaagaaatgcatttcttttctaatattagtatctcagaagcaattgatcacatggccactttagctgacattgaagaacatcatagtttatcatttaatagataattcataaatatggagacatttattacaaaatctttcctgtaattctagggtaaaaacacccagggttgtccaggtgtggtggctcatctctgtaatcctagcactttgggaggtcgacatggaaggattgcttgaggccaggagttcaagaccagcctgggcaacatagtgagaccctgtgtcttaaaaaacaaacaaacaggccgggagcggtggctcatgcctataatcctagcactttgggaggccaagacgggtggatcacgaggtcaggagatggagatcatcctggctaacatggtgaaaccccgtctctactaaaaatacaaaaaaattagcccggcgtggtggcaggtgcctgtagtcccagcacttgggaggctgaggcaggagaatggcgtgaacccaggaggcggagcttgcagtgagctgagatcgtgccactgcactccagcctggtgacagagcgagactctgtctcaaaaaaaaaaaaaaaaaaaactgtagccaggcatggtggcacatgcctgtggtcccagctactggagagtatgaggtgggaggatcacttgagcccaggagattgaggttccagggagctatgatcacaccactgcactccagtttgggcaacagagactccatctctattaaaaacaaaaacaaaaacaaaaacacacacaacaagcaagccaagtacagtgactcatgtctgtaatcctagcaccgtgggaggccaagatgggaggatcacttgagtccaggagtttgagaccagcctggacaatatagcaagaccccatctctaaacgtgtgtgtgtgtgtgtgtgtgtgtgtgtgtgtgtgtgtgtgtttctgtgtgtaaaaacaaaaaatcacccaggcttaactttatgtgtaatgaataaagatttttaattgggaagctaagacacaggaaggtcagtattgtgtgttttttgcatggtttttttggtaaactagcttgaccaagaggtagagcttasaagtggggactagacactgggctaagctcttagactccccagagctccagtgggtcatggggcctcggcctggagctgacagtgggtgagtgaggctgggcctttgcatgaggctggggcagagctgtctgttctgcagatggagggagacagtttgcagcctctgccagtgcccacacagaaagcctccgggcagggacatgtccttctgcaggggcttgggagcaggcccagatgwggccacacagagaggcccagtgtccttcctaaggtcagaaaacacagtgttcragagcacaggctctggggttatgggctcctgttttgcaaacctgtctctactgtttcccatatgaataaccttgagcagattatttaacttctctgaggcatggtttccccattggtgaaaatggaggaacatggtgaggactaaatgagctcgtgtgtgtaaaatgcatagcgtgggtctagcacctggcaggcactcaaatcctagtatcatccttcactttcgaggcagcataggattgaaattcagcctggaaaaggccaagaggaatccagtgctggtaatggtggtgaggaaggggtgcactgtcgccagggcctgacatcatagcggtgaattctctgcaatccctggcctcagcttcacagacagactcaccagcttgtggagaggagctctgtctttctgacagactctcatcagccaagcttccgagactggcataaagcagaatacagcttcctaaatttatggtagaactctggtcagctcagcaggtcaaccagagagctcaggacaataataagggtagcaccaaagatgcactaagattttgtccagggccaggagcagtggctcactcctgtcatcccagaactttgggaggctgaggcaggcagatcacttgaggtcaggagtttgagaccagcctggccaacatggcgaaaccccatctctaccaaaaatacaaaaattagctgggtatggtggcgggtgcctgcaatctcagctatttgggtggctgaggcaggagaatcgctagaactcaggaggtggaggttgcagtgagctgagattacaccactgcactccagcctgggcgacagagaagactcagtctcaaaaagagaaaaaaaaawtktttttaaccattttcttattgtggtaaaatacacataacataaatttcccactgtgactattttttaaatgcacacttctatgacatgaaatacatccacatttttgtgcagccatcaccaccatccatctcttaaactttttcttttccatctgaatttctgtactcattgagcgctgattccctagtcctccttcccccagacccttggcttctctacttattggctgtgtgaccttgggcaagtcatttaatctccctgttccttggtttcctcatctgaaaatgattacaaaaatagaactcattttataggtgtgttttgtggttttawtttcgtgcaattatattcaaggaatattttgctcagtgaaggaatgtggcacatccatataaatggcctggaaggatctggaagatacattattgaattagaaaaaaaaattgcaatagttcacacacagcgtgaatttacttacttaaaaatatgtgtaatttcacccctgaaataagaaatggtgggaaaaagaaaaaaatactaataaatggagaggaaaaggtctggaaggattaatatcagactaatggcagaggttacctctcagattgggaggatgggagttgaagggaactctatccttatcagtaacattttaattttttacactactaatgcattcctgcattgctgctgccattaaaaattaatacaccatccgggagggtgccgtgtgcagctgtctgcggtcctgacggggcaccaggacacagctactgctcctgactcaggacactgggcctttgggcctctctcccagcagctctgaaggtgtcgtgaagacacagtgaagaaggaggggagacccgtgggcagctaaaagtaaagatacccatggttggggagaaaaaagagagacrtcaaaaaatagattagttttgtgtaattgcaatcagtaagagaggtttcccagttgggagtgtctctctaatgttctacacataccaaccaggaaaggagccagccaggggtccagtttcccaagaactatggagggaaggagggrgactggggcttgtgggctaacagcctcagggtgaggcggcatccagccacggggctgacggcactgccatcagattttctcactgcctttcctgtcccagagcttctcctggcctagacaccctagctctgcctgccttcacccccctggctttctagatgatggagtgcgaggctagactaactcctgcctcaggctaacaatgtaactttgggcttccttttgagaattaaaaatactactttygggctgggcacatcggctcacccctgtaatctcagcaatttgggaggccgaggagggtggatcacttgaggtcaggagttcaagaccagcctggccaacatgatgaaacctcgtctctactaaaaatacaaaaattagccaggcgtggtggtgtgtgcctgtagtcccagctactcaggaggctgaggcacgagaatcgcctgaacctgggaggcagaggttgcggtgagttgagatcacaccattacactccagcctaggcaacagagtaagaatctgtgtcaaaaaaaaaaaaacaaaaaaaacctactttctcagtattataaaaatcatatatgttaattttaatttcagaaaaattagaaaatatagacaaacaaaaaggagagaggaaaagtgatgcataattttgcacccagagagagccactgttaacccttttggtgtatatattattccagtcctttctccaagtgcgagtgtatatgtgtgtatgagtgtaattttaaaaataaaaatagaataattcactatctgtatttgtttgacgtgctttcaattaacagtgtgtggaaaacayctttctctcacatcaaatgttctcttacagtgtaattctttatgggtgtatatcatgtcccatatcgaggtacaggatgatagatccatactgttggagttttaggatacctctagtttttcactgtgaaacatgctttgataaacatttggtagytttgcctttgatcacattgtaatctgtccttgactaagttagaagtaggatcatggccagatgtggtgactcatgcctgtaattccagcacttttggaggccaagtcaggcggatcacctgaggccagaggtttgagaccagcctggccaacatggtgaaaccccatctctactaaaaaatacaaaagttagctgggcgtggtggcacatgccagtaatcccagctacttgggaggctgaggcaggagaattgcttgaacccgggaagtggaggttgtagtgagccgagatcacgccattgcactccagcctgggagacgagtgaaattctatctcaaaaaaaaaaagaaagaaagaaaaaagaagaagtaggatcactatgatcctaggcctttattccgcgtaatcatggccagggaacatgatttgacccttgaggagtatgaattgctgcaatgattccactcagtgatagaccttgtytgagtgttgtgctctgtgatgctgctgtgcccagggttagggttgtggaggtggaggcatagtcaaaagcacacgtacttgacaagcagccagctatagtgctttgcatctgttggatgttgaggttgtgcagtggccctagcaaactattgctcaaatgaatttcccctcctttctttcagggaacactcatagggtggaccaaaggtttcaaggccactgactgtgaaggggaggacgtggtggacatgctcagggaagccatcaagaggagaaacgtaggatgtggtgttgaggctcatgcctgctcttgctgccttccccaggcccctctgctstgccatcctcygcccagttcctatgactctggcctctgtctgycttgggataacatgcccctcctaaacctgtttggcttgcacattcaactcatagtaaagctgggttttttttgtttttgtttttgtttttaggagtttgacctggacattgttgcagtcgtgaatgatacagtggggaccatgatgacctgtggctatgaagatcctaattgtgagattggcctgattgcaggtaggtggtcaggcatggcccattggcctaatcccactgtatccattgatggtttccttttaacatagtgagagggtgggcattgttccattatacagaggctctgcccaaggcagagatgaagttacaattgggattccaggtcaccaagttctttctgcattaagagtcctaagccaaggtcatcctttctattgaggaaggataatgacacaggaagaagagatttttaaataaggaccttggggccaattgtcatgggrgggggaaggagactacagttggatcatcttggcctggggctgagggagctattatagattttcactctggctccaatgtgtgcctcttctgttctctgaattcttctggttctcagggtgcacaggaaggagaggagctggaaagaaacttagaagaggggaaaggagtggcctgatacaggcattttaggggtctttgggagaagtctggcagtgattaaggccaagggtagattctagggggatgttctctctaagaggggtagaatgggtaggattggaacaggtggagatggggacaaaaggcattccaggtgataggcacaggctaagtaatgatagaacctagaaaagttgttccatttgatcatctgggctttctggatataagcagcaggtggaacaaggagatggggatgtactgagttatctcccatgccaggtaagaggtttcctctcactctaactcttacccactttgtgagcttgggcaggtggcttattctgtctgacttgagtttcttcatccgtgggagggattgggctagatctaggagagcaaagaggtgaggcctgttgattgactaaaatacttgcctggactgctgggctgagaatagttctgaggccaagtcatgggcaaggaagaagagggtggctcacagatgccaagcatttgcttgtccaagactagatgattcctcatggtcccttccagctctgactgctaattttacgactgcttggaagctttgtgtgcctatggcttaacaaagataatgatgatgatgatgatgatgaagtcagcaggtaccgtttattgaatgcttaccatgtgaaggaaacttaaagatatcacttcataacaaacccataggcaggtattatttcctcctcagaaatgaagaaactgagcctctgaaagatgagatgcttgcccaaggttagccagctatgactgtaaagctggaatcgcatccagttgtatctgactccaagcttaaattcttatttgctgcactctgccacctttctaaaacctggtgatgtctttgaagactaargttccttcacaattccttctaggaacaggcagcaacatgtgctacatggaggacatgaggaacatcgagatggtggaggggggtgaagggaagatgtgcatcaatacagagtggggaggatttggagacaatggctgcatagatgacatcyggacccgatacgacacggaggtggatgaggggtccttgaatcctggcaagcagaggtgaagagggtggatgtgtgcatttatgtgggttgtgtagtgaacaacactaccagacctaagggggtaccatagacagcatagctttgtgtgcttattacagctgtcgaatgtcagtgaaatatcctattggaacaaaagaaaaatatgatgasaagkttgcaacaggtaaaggggaaaagtccctttttctaattaccataaggccccataaggtctagtggtggttctggaagtgaggcagaggctgccagcatgttcattcaccaagggcatggtaactcagtgagccttcttgagatgggcttttaataagtctctttcagaggccaacatcctcaggccttcaagagctggctaccaggttggtgaccttttctgggagtggggaagtggccacctgtgatggatgagagtgctggttctcgaccatgatgtcatgtcccaccacgggtcacaatcacttgtgaggtgtattccaatgactaaccacatgaaaaatactgaaaataatgaatggcctaaaaaataaattagagtagatttcacttgcattatgatattatgagagaaaggggtagcagagctagagctggcatgtgatattagtccattctcccgttgctgtaaagaactacctgagactgggtaatttatgaagaaaagaggtttaattggctcacagttccacaggctgtgcaggaagcatggctgggaggcctcaggaaacttaccataatggcagaaggtgaaggggaagcaggcacgtcttacatggctggagaaggaggaagaaagagtgaagggggaggcgttacacactattaaaataaccagatcttgtgagaacccactcactatcaccagaacaacaggggggaaatccacccccatgatccagtcacctcccagcaggcccctcctccaatactggggattgtaattcaacatgagattttggtggggacataaatccaaatcatatcacatgctaaaatttgattattaacccaggcccatccactagaagaggagttggcacacttattctgtaaaagaacagatagtaaatgttttaggttttgcaggccatatggtctttatcaaaactaagctcagtgtcttaatatagaaaataatgggaaacatagatttattgttatgggtgctatccaagttgagagcttgagcagatgggaaatgtgaggggatgcttaggccatggacaccttgggagctgttgaactgagaatgttgtctaggaagaggctcagacaagaccaagactggccctggtggtttctttcctctttggcaccaatcttgtaactggaaggcaggtgagttgtggtaagcccagctgaagcaaggattgctccaaaaagaagggaccttccctttgaatcccaagttggggcacctgagtgtcatggctcttcccaaggggcagttcattctagttagctttgtgtctgtagccactgaaggctcacatttttggattgaggttttaagggggcagcacctttgaacttgccttgaaatcaccattttttgttctggtgttaattcccttaggctgatgaggtcttgagcagttaagagaacccaagcccagcacataaatgcttcccatttgactctgcaagcagtggcagtctggctctgtgtcactgttgttaatgatgatgtgtgtcaccatcacacaccctgtgcagagtgcctggtcagtacaaggccccttttctctcttgctctcttgaccctcatggagctcacggtctggtagaaaggaggaagggaattaatgcttttgagcacccctggtgcatgcagacagtttcaatgtgttaactcacagagtagaatttgcagagtggaacagatttgtagcacaaagccaaggagaattggctttggggccaagaccagggactaaattttgcttagtgcccactgtacccagatgcttgcctcctaacagtcttgtaggggcgctactcttctccctgttttgtagatgatagcttgcagtgcttgctcacatcaagcagctagtatgtggcagagctaggatctggatcttgctccatgcgtagctccaaagcctggccttctcacatcatgtggycttctgcattgcaggtctgccccaaccttatccttcttctccaaacagataygagaaaatgaccagtgggatgtacttgggggagattgtgcggcagatcctgatcgacctgaccaagcagggtctcctcttccgagggcagatttcagagcgtctccggaccaggggcatcttcgaaaccaagttcctgtcccagatcgaaaggtgacctgtgatcaagttcatcatgaggctctgactggcatatgctgccaccaygctggggttgggccaatttgaggtttaaaaataaaaacagaaaggccctggctgggtaagggattgcctcctggggctgctcttctctttccaactgattcaggatcgctttcaacaataataaactcatggccaaactgggctcatctataaagtcctgctgtccccatcctcaggctgggctaatttgaaacaaaccccacatcttacatcagttcatctataaatatttcataatgtatttctgaaatataaggattcttaataaaacataactacagtaccattatcacacttaaaaagctaatgataaacctcaatctcacaaaatatcctgttagtgttcttatttcctgaattgccaaaaattaatggtttttacagttcttttgtttgcatcagtatccagacaaagtttataaactgcatttggttgatatgcttaaagaatctcttttaatctatgggtttcctctccctctcttactttcccttgcaatgtatttgttgaagaaactgttgtcttatctatgagtttcctgtattctagattttgtggattgcagcatttagcattttcctctgtcttcttgtatttcccaaaaactcatagttagacccagatgcttaattagattcagtagtgaattctggacaagaatattttctaggtggcattgagttgtctgtctgtctctctttcttttaggatgttatcagtcattgatgcatattgcctggatctattatttcactagacatcgtaaatggtgatgattcctgcagttattagctggaatacttctagaaagaggaactttcccctatcaactctttggtgtaattatcattttgaatggctgcatattatactatgttactgtactataatttactaaactttccctttaatataggatgtctagtttgtaatttataaattcctgttattctgagtaacaccatagtttttcttttagtacacatagtcatttgaatacagtaaatcatttccttagtagtagaaacatttggttaaaagagtatttcaccatgggcgcagtgtttttttttttaaagtagtttcaatttccatcaccatcagttatgtacaaatgtgtcagtttcactgctttttrtgctagcactggatgttatctgatgctttgtgtttggattttctctccatttgtgttcattcatttaattctcttggtctttatggtcagatgcccacaagtgaaaaatcacttttcagcggggaaaaaagaaacacattatacatgaaagtggtttacttaatgaggcaaatcagatgggctgtttaaggggagttcttattgtttaaggagaggatggtggaatcagtaacagcagcagcgattatgtatttttggggtgtaaattagcaagtgttcagcatccttctcctgtctagtcttcaacccatccaatctgaacagatgggttaaaaatcatcacgcttggtgaccaaagggatcctgttttgctgtgtaaaacagcttctccctcataagcaatagaccgacaagtttacttatctttgccttgcttttttttttttccgtaataaaagaaaagttgttcctagacaagcacaaggtggtaacactcttatgccaccagaaagatttgcttctgctgcacaagaggtgtctgttttggatgttttgatttctacaggtttctgttgttgttttgtttttgttttctgagacagggtctcactctgttgcctgggctggagtgctgtgttgcaatcacagctcagtgcatcctcaacctcccgggttcaagtgatcctcccacctcagctgccaccactgctcctctcccctgctcccattccctgtcaagtagctgggactacaggcacacaccaccacacctagctaatttttgtattttttatagagatggagtttcaccatgtcgcccaggttgatcttgaattcctgggctcaagccatccatctgcctagaactcccaaagtggtaggattacaggcatgagccaccgcgcctggccaggttttgttttttaaaagcttcatggaataaaaaaaaaatcatatccacctagtgccagtgggaattggtaggtgctgtgctgactgcagcccatttcaaagcagtttgtcaaatggatgggacagtgttctccgggggaagtgccctgaatttacagtcttagagcttgagttttaagatttatctccactacttaacctgtttatgctgcgtgacctggggcaggttgtttcacctctttgaacctcagtttcctgcttcataacagaaataattgccctgttgcttaacccccaggattgctctgaggatcaggaagggaatgtacttgaactaggtaagctgtgaaaggctgggcccaggaaggaattgcaggctttctctttagacacaccagttaaaaaacctctttttcttactatacaaatgttattcattcattttagagaatctaaaaaatacagataaacaaaggaagaaaaataagaattaagctacgtgtggtggctcatgcctgtaatcccaggactttgggaggccaaggcaggcagatcacctgaggtcaggtagccaacatggtgaaactctgtctctactaaaaatacaaatattagctgggcatggtggtgggcctataatcccagctacttgggaggctgaggcaggagaatcgcttgaacccaggaagcgggtgagccgacatcattgcactccaacctgggcaacaagagtgaaactccgcctcaaaaagaagagaattacctgtaatcctcccaatgtctgaatagatttccttckgtgtgtgtgtgtgtgtgtgtgtgtgtgtgtgtgtgtgtgtgtgtctttttttaatctgggcaagggcaaacattaaaacaaaaagccagcatcatacagtgcatagtattttataatctattttttcactatgtcatgaagattttccatggtgtgaaatattctcacgcaaactcatcttttttttttttttgagacaagatcttacgctattacccaggctggagtacagtggtatgatcatggctcactgcaacctcaaactcctgagctcaagcaatcctcatgcctcagcctccaaatagggactataggcatacacaatcatgtctggctcatttaaaattttttagagatggggtcttgttatgtagcccaggctggtctcaaattcctggcctaaagtgattctcctgcctcagcctcttaaagtgctgggattacaggtgtaagccactgtgctggccacaaactcatctttaagatctatgaagaattctattgtttggctacaccgccatttacctgctgaatcccctgtatggtcatataggttgtttctcaattgtctttcttgataacactcttcttctctaagtattacctgagacagtcaaggatacaacttcacattgcttggtgtgggagtcagggctccgtttaagtaccattagttcactgtgagatgaccagggtctagacttgaagccagcctgcccctatgatgggtgtttctctgcatgtgtttacagtcctatcaggttccccttctctaaggttctgattgtattttgtatattcatttattcacttgctcattgaatataccctgctggctactactgaagatatagtcttactgtcaaagagcagagaaatgagaaaaagggaagaaagtgcagagaatcagaaaaagttaaatagaaggaaagttggcctccaattgaagggggccagagtgtgggagctggcacgatttgtgggaaagtgcgagaggtggtgtgaaaaggcttgaatttgagcccctgctctctaacgagagggcacagctctagcaggctgagccacagcctcctcttctgaaaaatgggtacctggtgtgttggttgctgcagctcatatggcttctagtgagatcacagatatgaacatgctgaacaccagaggcattcacactttattttttaaagttgatggaacttccaggggtggtggaccttcttgagtctcggcttctaaggcattctgctccagcctagccattgcctgggtcaatttctcctccctcctgtaagggcatctaagaatggggaggctgtgggtcacactgggcacatccyggggtcctgggaagcaggtcctgactccctgctctattgcctgcagcgatcggctggcccttctccaggtcaggaggattctgcagcagctgggcctggacagcacgtgtgaggacagcatcgtggtgaaggaggtgtgcggagccgtgtcccggcgggcggcccagctctgcggtgctggcctggccgctatagtggaaaaaaggagagaagaccaggggctagagcacctgaggatcactgtgggtgtggacggcaccctgtacaagctgcaccctcagtgagtgcccacaagaggcgtggcgggtggggctggggagggctggcggccaagtgtggacttggcatagcctcctgaactgcggcatgggaagatgcatccccgtccttttatgggaaaggagtgctgtgtggtcaagtcacctattcaatctgacagacaaggtgtgagccctggtgcctctgctacctggtaatacgatgtgggaatgttagccggcctctctaaaccccaggttcctcatccacaaaaggccagcactaataatccctaccacatagggctaaatgtgtgaggttgaaatgagttagcacatgtaaagtgcttcacacggggctcaagaaatgtaagttggctgagtgcagtggctcatgcctgtaatggcagacgggaggatcacttgagcccaggagtttgagaccagcctgggcaacacagggagactccatttccacaaacataaataaataaaatacaaaatgaacaaaaattacaaatattagctgggcgtgatagtgcatacctgtggtcccagctacatgggaggctgagctggggggcttgagcctgggaactcgaggctgcagtgggctgtgattgcacaactgcagtctacaccctgggcaacagagtgagaccatgtctaaaaaaaaaaaaaaaattagaagaagctgtttagagccttgaaaagcaaaccaaagggaagaagctaaagaaattagattatgatcatttataaatgttctgattctacatggaagggctgatgatgtttctttctctttttcatagcttttctagaatattgcaggaaactgtgaaggaactagcccctcgatgtgatgtgacattcatgctgtcagaagatggcagtggaaaaggggcagcactgatcactgctgtggccaagaggttacagcaggcacagaaggagaamtaggaacccctgggattggacctgatgcatcttggatactgaacagcttttcctctggcagatcagttggtcagagascaatgggcaccctcctggctgacctcaccttctggatggccgaaagagaaccccaggttctcgggtactcttagtatcttgtactggatttgcagtgacattacatgacatctctatttggtatatttgggccaaaatgggccaacttatgaaatcaaagtgtctgtcctgagagatcccctttcaacacattgttcaggtgaggcttgagctgtcaattctctatggctttcagtcttgtggctgcgggacttggaaatatatagaatctgcccatgtggctggcaggctgtttccccattgggatgcttaagccatctcttataggggattggaccctgtacttgtggatgaacattggagagcaagaggaactcacgttatgaactagggggatctcatctaacttgtccttaacttgccatgttgacttcaaacctrttaagagaacaaagactttgaagtatccagccccagggtgcagagaggttgattgccagggagcactgcaggaatcattgcatgcttaaagcgagttatgtcagcaccctgtaggattttgttccttattaagtgtgtgccatgtggtggggtgctgtctggggcatctgtttttcattttgcctgtggtttgtgttgcagstgttgatagttgttttaaggattgttaggtataggaaatccagtaaattaataaaaaaattttgattttccaataaactttgcatgaagtggtgatatttcttctgggaggctcacttggtaataccatgctttgttgatggaataagggatgcagagtcagaaggagcttgagcatttttctcgagtccaaacttcctaccaacaggggtaatatatggaatatcttctacaatatccttaacagattatccagatgtctttagaatacttccagtaactgagcatttcccacatgatcctacagctcttgcctttgaacggctggagtggactggaagtccttctgacttctgagctcggttcctcccatacaccccactgatctccattctaccctgcagaactatgtgtaataggcctgtccctgaccatttctccagtggacttcctctctctctcctctcttccccactttacctgaactgcctgtgcctttctgttctgccacatagttatctgtatgagtttcacatctggccagatagattgtaaactctttgtcaaacacattcttgtattgctctagtgaacctagcactgtgccattcctatcaaatacttacttgtgggaggcatgattgaagaaatagaacttttcaagaaattttcttcagataaagtatagactgggtatggtggctcacacctgtaatctcagcactttgggaggccaagtctggaagattgcttgaggccaggagttcaagatcagcttgggcaacatatcaagacccccatctgtacagaaaaatttttaaaattagttgaatgtggtggtgcacacctgcagtcccagccactcaggaggctgaggtgcggggtatctctcgagtctaggtttgaggttacaatgagctatgactgcaccactgcactgcagcctgggcaacggaaagagaccctgcttcttaaaaaaaaaaagagagagagaaagagaaagaaatgaaagaaagaaagaaagaaaaagaaagaaagagaaagaaagaaaaggaaggaaggaaggaaagagacaactattgtcatgggaaacaaactgaaaagaataatccacagtgattttatttgtatttatgtgcttaattacatacttaagtatgacaactccacagagtgctcttgctgtctcttcaaaagattatggctttggtcaggcgtggtggctcatgcctgtaatcctagcactttgggtggctgaagcaggcagatcacttgagttcaggagtttgagaccagcctggccagcatggtgaaaccccgtctctactaaacatacaaaaaaaaaaaaaaatagccgggcgtggtggtgtatccttgtgatcccagctacttgggaggctgagtcaggagaatcacttgaacctggggggtggaggttgcagtgagccgagattgagcaactgcactccagtctgggtgacagagcgagactctgtctcaaaaaaaaaaaaagtttttggattccagctctaagcgtcaccatttgctgaagcgggatgtccagatggagtgaagggggctgagtctaaagacggagagagagagaggccagctagggctggggataatgagggagctgagggttccccaggacatattttttacactttcttttttgttgttttttgagacaaggtctcattctgtcactcaggttggagcatggtggcgcaatcacgaatcactgcaaccttgacctcccgggctcaaggcattctcccatctcagcctcccgagcagctgggactgcaggcgcatgccaccatgccagctgatttttaaattttttgtagagacaggggtctcactatgttgccctgacttgtctcaaactcctggcctcaagtgatcctcccgccttggccttccaaagtgctgagatttatagtcgtgagccactgtgcctggtccatactttcaatacaaatgtatggtgatactactgtgaacaggtcctagatttaccaaaattatctttttgtgtgtttgtgtattttaaggttatatctctttagagaaatgtcgtatgaatttattaaatgtatctttttatattttgaagttatgcctctttggagaaaggtttcaccttatcaggtttcatcttaatcagttgaaaaccttgctgtccttattctctttccccaggtctcccatttcatggtaagtcatcctcagctcccagtccctctttcccctggttctgctaggggtctttctctttgctgtctttcctggacaaatgatctgacccatagattcaggttgttgtgccactaagttctcccatgacctggtctctcagcacatgtttggcaggttagggaggtcacccagtcccttctcacccagccgtggtctcttacaagaaaaaggagacacaaggtatctaggcaagcttgcacattctgactaattgattgcatcatagaatccttgaacaagaaccagaactccagagagggaaaacatctatcttgctgtgtttggacaggccagcccctgaaacatcttgggcaatggagggttaacttctcaaagtttaataggcaagaccagcaaccatgcaacaaggtaaattgtcctcacgagaactccaaagactatttttctctctctttttttgaggcagggtctcgctatgttacccaggctgctctcgaactcttgggctcaagcaatccccccatcttaacctccccagcagctgggactacagccacgcgccactgcacccagctgacttttccttctaagcatctttggctgggcgtggtggctcatgcctgtaatccctgcactttgggaggccaaggtgggtagatcactggaggtcaggagttctagaccagcctggccaacatggtgaaacctcatctctactaaaaatacaaaaaaattagctgggcatggtggcaggtgcctgtaatcctagctactcgggaggctgaagcaggagaattgcttgaacccaggaggtagaggttgcagtgacccaagattgtgccactgcactccagcctgggtacacagcgagtctgtctaaaaaagaaaaaaaaaaaaggaagagagagcatctttatcttcattttctaacctttaagtgttactttctcccagtaacattttgcccagaaagaggtgatgaatatagatttaagaataagattttccccatgttgctgcctttccagaacaagtgagttcattctcatttgtctttcttcagaaatcttttatctgtctttctcccattagctggaatgggtgctccatgagaataaagacttgggttccattcttcctattgtccccagagcctacatactggctggcattgagtagcaattgaacagttttctgaatgaatgaatgaatgaatgctcaaataagcacatgaattaattatcactttcctttgaatctctccattcttcttcctcacccaatggggctcgatccttatacacagaagatactctataaatgatgattcaatgaatgccaagccctgttctatgcactgaagaccaaaagaaataaaagacatcattcctgctctgtaagaattcataggctagtaaggaaagaaagatatataaatatctgtaatacaacatggtaaacaggaacaaggtgacgactgttcctgaccatttcctgtatcctttagatcaggaactctcaacctttgtgcacgtgtatgtgtgtgtgcatgtaccatgtaccccttggacaatcaagaatacaagaaaccttgtattctttctcagaataatgtttttaaatgcataaaatacacaggattataagggaaattaatggcatgaattacatttattaaaatgttaaagtggcaccatggtaatacatgcatgtatttattaatgcattatgcagcaagatccagcaggaacctaataacaatgacaattttgaagtcttttttttttttttttgagatggagtctcgctctgttgcccaggctgaagtgcagtggcgcaatctcggctcaccacaagctctgcctcctgggttcatgccattctcctgcctcaagcctcctgagtagctgggactacaggtgcctcccaccacgcccggctaattttttgcatttttattagagatggggtttcaccatgttagccaggatagtctcaatctcctgatctcgtgatccaccctccttggcctcccaaaatgctgggattacaggcatgagccactgcacccggcctgacaattttgaagtcctgatgagtgtaaacactactttgagacatttgcaacaacagcatagatatgaatatatctgtgatttctctttttttttcttttttttgagatggagttttgctctgttgcccaggctggagtgtagtggcacaatctcagctcactgaaacctccaccccctgggttcagtcaattctcctgcctcagcctcccgagtagctgggattacaggcacctgccaccatggccagctaatttttgtatttttggtagagacggggttttgccatgttggccaagctggtctcaaactcctggcctcaggtgatccgcctgccttggcctccaaaagtgctgggattataggcgtgaaccactgcgcctgacccaatatatttgtgatttccactggagacaaagtcacagatgctgctagcactagtgggtttgttgcccacattcagaattaaaggaaatgctaaatttcagttacagactatcagaaattaatttgtatttttttcccacagaagcttacggatatcaccttctacctgaagggtctctgatgcccaggttattaatctctgatcagaatgttctaatggagctggcacttatttagagacagatcttagatggcagatctaagcaattttagcattccttgtagtacagcactgatggtagtaaattcacgcaacttttgtttgtctgaaaatgtctttttacccttccttttttaagaatacacaatacacagttctagtttggtacttttttcctccagtattttaagaatgtcatttcattttcttctggcttccataatttattttgggaagtcagttataattcttattactgtttttctgcaagttttttttttttcccctttctagctgtttgtaagggtttctctttctctttagtttccaacagtcatttaactataatgtgcttggatgtgtttttgttttagtgcatgtgttctttttttttctttttttaaatttatcttgcttgggctttgctaagatcttcttgaatctgtgggttaatatctttcattgtttttttgaaaattcttgttttatgactcattatttctcctctttccttctgaaattccaatatgcaaacattagagcatttcatcctgtcttacatctctttcaagttctgttccagtttttttgccattttttttttctctgtgcttccgtttgcataattccttttctttcttttttaccttttttttttttttttgagatggagtctcactctgtcagccaggctggagtgcagtagtgcaatctcagctcactgaaatttccgcctcttgggttcaagcaattctcctgcctcagcctcccaagcacctgggttacaggtgcccgccaccatgcccagctaacttttgtatttttatttatttattcatttatttatttgagatggagtctcactctgtaacacaggctggagtgcagtggcgtgatcttggctaactgcaggctccacctccggaattcatgccattctcctgcctcagactcccaagtagctgggactacaggcgcccgtcaccacacccagataatttttttgtatttttagtagagatggagtttcaccgtgtcagccaggatggtctccatctcctgacatcatgatccgcccacctcggcctcccaaagtgctgggattacaggcatgagccaccgctcccagcctaacttttgtatttttagtagagatggggtttcacca

SEQ ID NO: 95271 - DNA, 12538 bp, Homo sapiens
taaaagatataaaagccattcttagttcccaggccatcagtaaaataggcagtatgctagatttggcccaagcccaaagcttctgacttctggactgaatagtttcaggcagtacttccgatataacttttttttttttgagacagcgtctcgctctgttgcccaggctggcgtgcagtggcacaatctcagctcactgcaacctctgcctcccatttcaagcgattctcctgcttcggcctcccgagtagctgggactacaggtgcggtcaccacgcccgcctaattttttgtatttttagtagagacgggatttcaccatgttaaccaggatggtcttgatctcctgacttcgtgatccacccgcctcactctcccaaagtgctgggattactggtgtgagccactgcgcccggcctacttagaatataatcttatgcaattttattttaatttatttatttctggagacaagattttgctctgtcacccaggctggagtgcagtgacaccaccatagctcattgcagccttgaactcctggcctcaacctatcctcctacctcatcctcccgaggaggtgcgcccactccatgcctggctaatttttttttttttttttttttgtggagatggagtctcaggccaggtgcggtggatcatgcctgtaaaaaatacaaaaattagctggcaggagtatcacttgaacccaagagcaagaggttgcagtgagccaagaatgtgccactggttgcagtgagccaaaaatgtgccactgcactccagcctgagcgacagagcaagaccctatctcaaaaaaaaaaaaaaaaaaaaaaattagctagctgtggtggtatagtcccggctacttgaatggctgagttgggagcatcacttgagcccaggaggcaaagtttgcagtgagctgagattgtgccactgcactccagcctgggtgacagagcaagatgctgcctcaaaaaaaaaaaaaagaaaagaaaataggacaagttgggcatagattttgagtggaatagagttaaggcacaaacagacttttttctacctttttttttttttttttttagtaagagataggttctcgatctgttgcccagtgtagcgtgtcacccaggctggagtgcagtggcaccatcatagctcattgcagcctcgaactgcactccagcttgggcaacagagtgagactctgtctgtaaataaataaataaagggaagagcagtcgattggggatgaggaaactgggtcttagcctagctggttgcttactatatggcttgagtaagtcatttcacttctgtttccacaggtgcaatatgaagatgaaaactatcctgcacacctcacaaaactaaggtgtatgtgtgtgagtgggagcataatgtgagacgcctttgtcttctaagccacctctaggctcacactgactagcaagctttgcttgtccctttcagttgcaatgttgctgtcactgtcaccctataatctctttaattggcagttgcagaccaagggcccacccttcctttaatgacagctggctgaagccttccaactttagttgtcccaagtcacactggctgacttataaagccatatctgtggccgggcgtggtggctcatgcctgtaatcccagcactttgggaggctgagccaggcagatcacctgaggtcaggagttcgagactagcctgaccaacatggtgaaaccccatctctactaaaaaaaatacaaaaattagtcgggcatggtggtgcgtgcctgtaatcccagctactcgggaggctgaggcaggagaatcgcttgaacccgggaagtggaggttgcagtgagccgagattgcgccactgcactccagcctgggcaacagagcgagactctgtctcaaaaaaaaaaaaagccgtatctgttctctagtcagctccaaggaagtgcctagatgggagaaacccacacatctcatctagtagaaaaatagtcactgttcctcgcaatggttattcaaatacacaatgcttacgctcgcctcaggactttatctatgctgtttcctctgcccataaggtccatgctcaaattctgcacacggaaggctccttcatatcacttgcaactagtttcacgtgtccctcccctccattctttcccttgccttatttttcttacttctatctgcattctcttgtttacctgtttttgtctgcatctcccactgggataaaagctccagaatatctggcagtaggcactcagtacaatgaatctccccagcctccccactctcagcttagtcacctcccaatagcatcccttttccagccagaccacactggcttgccctgatgagtgttcatgccttaggtacagccagagtttcatctggataccctatgactatttctatcactatatgacatttttttttttttttttgagatggagtctcgctctgtcacccaggctggagtgcagtggcacgatctcggctcactgcaagctccgcctcccaggttcacgccattcttctgcctcagcctccagagtacctggcactacaggcacccgctaccacactcggctaattttttgtatttttagtggagatggggtttcaccgtgttagccaggatggtctcgatctcctgacctcgtgatctgcctgcctcagcctcccaaagtgctgggattacaggcatgagccaccgggcccggcctgttcaggttttatctcccccactagatgatacactttgagaggaactcttttgtatagaactttggagttcgaagagattttagtgtttatctcatccaaacttctcacctaatgtctgaatcccctttatgaatctctgataactttttttttcttttgaaatagggtcttgctatgtcacccaggctggagtgcagtgactcactcttggctcactgcaacctctgcttcccctactcaagcgatcctctcacctcagcctcccgagcagctgagactacaggtgcatgccaccacacccagctaatttttgtatttttcatagagacagggtttcaccgtgttgcccaagctggtctcaaattcccgcgctcaagtgatccacctgcctcagcctcccagagtgctgggattacaagtgttagccaccacacccagcctctgacaacttctgatttcatcttttgaagacctctcattctggggctctccttacctaaagaatagaggctcagtgcaggaatagaggatgctgaatgcaatgttgttgaattcatgctacttctcccttaaaactgagtcagcccttggctgggtgtaggttgcagaagagggagaacacagagaactgaacaactttttggctaaaaatgttggggaatgtttccaacgaacttgtgtccactgccacttatgccttgtgatttagctcttgcccattgttatttagggcaaccaaattacaaaacttaaatctctcttttttcctcctcttaggaaaggctatgaagaacatttggcaggagcattgcagctaacaaagccctttccaatacttcagcttgttagaactctttgatgcaggcagtgttatcctcacattagggaggaaactgagatttaaactaagtcattaaggttggcaaagctagcattcaaacccaggtcatttagcttcaaaaagcctagtgccgtgttttcactaaacagtcacgtgtctaaaaaccaagccaggtgcagtggctcatgactatgatcccagcactttgagaggctgaaataggaggttcacttgatcccaggagtttgagaccagcctggacaacatagtgagatccccgttgctaaaaatattttcttttaattagcgaggtgtggtggtatgtacctctagtcccagctactcgggagaccgaggtgggaggatcacttgagccatgattgtgccactgcactccagcctgtgtgacacagcaagaccttgtctcaaaaaaaaaaaaattaaattaaaaaaaccctctgttgtgcaaaggccgattttggccctggagaaagaatcagggtcagtcaggtgcggtggctcacgcctataatcccagcactttgggaggccgaggcgggtggatcacttgaggtcaggaattccagaccagcctggacaacatggcaaaaccccgtctttactaaaaatacaaaaattagccgggcatggtggtgcatgcctgtaattccagctactcgggaggctaaggtaggagaatcacttgaatccgggaggcagaggttgcagtgagcggagatcgtgccactgcactccagcctgggcaacagagtgagactctgtctcaaaaacaaaacaaaacaaaaacagaaagaatcagagtcaacaaatcagtatggatgcagattcctcagatgccaggaatcccaggataaatggcaggggtgaaccaaatacttcccattcttccctcaccaccctcctccatccaataaagaagtaaataaattcctcaagtcccctctgccccagtgcatggaatgtttacctgtggactaggactggtctacatgccaaacaggccttgcctcctgggcggcatgtttgcaggggatccttgctgatgatgttggcctcctcctgcaccctcccactccatggctgtctcacctgagagagctttcttccttttgcattaagtgtgagtcctgataaattcaaaaaagcctccaggtgacatcattttaacaccagttaacaatcacaaatctgggtgaatgagcctcagagtttttcttgacagtagtgtgcgtgcgtgtgtgtgtgcgtgttttccatggaaaaataaaatgtattacacaaactatcagtattaattacagaaaggtggccaggtgcagtgcctcacgcctgtaatcctggcactttgggaggccaaggcgggcagattgcctgagctcaggagtttgagaccagcctggtcaaacatggtgaaaccctgtatctactaaaaatacaaaacattagctgggcgtggtggcgcatgcctgtagtctcaggtactcggaagggtgaggcacaagaatcgcttgagtctggaaggtggaggttgcagtgagccgagaacacgccactaaactccagccggggtgacagagcaagactctgtctcaaaaaacaaacaaacaattaattacagaaaggtaagcctggccaataggtcaggaaaagcagccccactgcagatccacaccactacggaaacttgaggcaccacacacatgactttgctgactgggggcaaaggatgaactagtgagcaaacttgggaggctgagacaggaggatcgcttgaacctgggaggtagaggttgcagtgagccaagatcgcaccactgctctccagccaggtgacagagcgagactccagctcaaaaaaaaaaaaaaagtcaagatattaaatatgaaagcaacactttattttttattttattttattttaagacagggtctctctctgtcacccagactggagtacagtgacatgatctctgctcactgtgatctctgcctcccaggctcaaactatcctcccacatcagcctcccaaatagctgggactacaggggcccaccaccacacctgactaatttttgtatttttggtagagatgcggtttcaccatgttgcccagcctgatcttgaacttctggattcaagtgatccgccctcctcggcctcccaaagtgctgggactacaggcttgagccacctcgcccagctgaaagtgacactttaatactttcaggaaattataggagatgattgttaagagctcaggataaagagaagtttctggccgggaacggtggctcacacctgtaatcccagcactttcagtggcggagcacctgtggccaagagtttgagaccagcctggccaacatggtgaaaccccatctctactaaaaatacaaaaattgaggtgccgctgttgctgctcgtgttaaatctagaaccgtagccagacatgggactggaggacragcaaaagatgcttaccgaatccggagatcctgaggaggaggaagaggragaggagraattastggatcccctaacaacagtgagagagcaatgcgagcagttggagaaatgtgtaaaggcccgggagcggctagagctctrtgatgagcatgtatcctctcgatcacatacagaagaggattgcacggaggagctctttgacttcttgcrtgysaaggaccattgcgtggcccacaaactctttaacaacttgaaataaatgtgtggacttaattcaccccagccttcawcatctgggcatcagaatatttccttatggtttcggatgtaccatttgtttcttatttgtgtaactgtaagttcacatgaacctcgtgggttttggcttaggctggtagcttctatgtaattcgcagtgattccatctaaataaaagttctgtgatctgcaaaaaaaaaaaaaaattagccgggtgtggtggtacatgcctgtaatcacagctacgtgggaggctgaggcaggagaatcccttgacgccaggaggtggaggttgcagtgagctgagattatgccactgcactccagtctgggtgacatagcaatactctgtctcaaaaaaaattttttttttctttttttaaacaatttacttattcatttttaattttttctgagatgaagtcttgctatgttgcccaggctggtctcaaactcctgggctcagatgatccgcctgccttagcctctcaaagtgttgggattatgggtacgagccacaaacagacaagagaagtttctttttttttttatgagatggagtctcactctgtcacccaggctggagtgcagtggcgtctcctcggctcactgcaacctctgcctgctgcgttcaagtgattctcctgcctcagcctcccgagtagccgagactacaggcgcccgccaccttgccctgctaatttttgtatttttagtaaagacggggtttcaccatgttggccaggctggtctccaactcctgacctcaggtgacccgcctgcctcaacctcccaaatgctgggattacaggcatgaaccacctcgcccaaccgaagagaagtttcttaagataaaaggaaatgcaggccgggcttgatggctcatgcctgtaatcccagcactttgggagtctaaggcaggaggatcacctgagcaacatgaaaccctgtctctaccaaaaatacaaaaaattagctgggtgcggtggcatgtgcctgtgatcccagctacccaggagggtgaggtgggaggatcgattgagcagaaatctcgctactgcactccaacctgggtgacagaatgagaccccgcctcaataaataaataaataaataaagaccataaaggaaaaaaattgatacattacctccatcaaaataaatcaaaagccatcttaaaacagaatctcaggctgggcacggtggctcatgcctgtaatctcagcactttgggagtccgaggcgggcagatcacgaggtcaggagatcgagaccatcctggctaacacggtgaaaccccgtctctactaaaaatacaaaaaattagccgggtgtggtggtgggtgcctgtagtcccagctactcgggaggttgaggcaagagaatggcgtgaacgcaggaggcggagcttgcagtgagctgagattgtgccactgcactccagcctgggcaacagagagcaaaaaaaaaaaaaaaagaaaagaaaaaagaggctctcaactctggccgcaggagcatcaccttaagggagtttttttttgttgttgtttttgtttttttttttgagacggagtttcgctcttgttgcccaggctggagtgtaatggtgtgatcttggctcaccaaaacctccgcctcccaggttcaagtgattctcctgcctcagcctcccaagtagctgggactataggcatgcaccaccatgcccggctgattttgtattttttttttagtagagacggggtttctccaggtaggtcaggctggtctcgaactcttgacctcaggtgatccgcccacctcagcctcccaaagtgctgggattataggtgtgagctaccacgcctgtacccaactaacttcttgtattttttgtaaagacagggtttcaccatgttgcccacgctgttcttaaactcctgatctcaagcagtccacttatgttggcctcccaaagtgctgggattacaggtgtgagccaccacactggcattatgagccaccacactggcattattctttaaaaaatatattatgaccaggcactgtgcataacaaaacaaagcaaatgcatgtacatactaaaaaatggtagctgctgccaccacacctggccctttttaattaagaaaaaaacttggccaggcgcggtagctcacatctgcaattccagcactttgggaggccgaggtgagcggatcacaaggtcaggagatcgagaccatcctgaccaacatggtgaaaccccgtctctactaaaaatacaaaaaattagctgggcgtggtggtgtgtgcctgtagtcccagctactcgggaggctgaggcaggaaaatcgcttgaaaccaccggaaggcagaggttgcagtgagctgagatcgcatcactgcactccagcctgggcaacaagaatgaaactccgtctcaaaaaaaaaaaaaaagaaaaaactttttcagtcaggacctcactatgttccccaggctgctggtctcgaactcctggcctcaaacagttctcccaaagaactaatggtgtgaaccaccacacctggcctcaaacttttaaaaaacacaaatggggctgggtgcggtgactcatgcctgaaatcccagcaatttgggaggccaaggtgggcagatcatttgaggttgggagtttgagaccagcctggccaacatggcaaaactccatctctactaaaaatacaaaaattagccaggtgtggtggcacacgcctgtaatcctggctactctggaggctgaggcaggagaatcacttgaacctgggaggtagaagttgcagtgagccgagatcacaccactgcactccagcctgggtgacagagcaagacttctaaaaaaaaaaaagcctgcataccattctgtcacttgcttttttacttactacctcaaaatgttgaggttcattcatccaacaaatatttagttagcccttaaatatgtgctcagcagctagggacccagcagtgcccttgccttcaaaggattttcattgcagtagaggggacacacgatagacaacaagcaagtagtaatgaaagacaagagggagatgacaggtgacagacaagttaatagggcccaggctcagtggctcacgcctgttatcccaacacaatgggaggccgaggcgggtgggtcacctgaggtcaggagttcaagatcagcctggccaataccccatctctactaaaagtacaaaaattagccaggcgtagtggcgcttgcctgtggtcccagctactcgggaggctgaggcaggagaattgattagacccaggaggcggtgaggttgcagtgagccgagatcgagccactgcactccagcctgggtgacagagtgagacttcatctcaaaaaaaaaaggaaaagttaataggaaggcagcctatatggtctggtgtcgtcttttagcaattccgtgaagtacaatggagtttccaggttttctctgtgacaaagggatgctgctttgtcacttttttttctttcgaggcagggtcttaccctgtagcccagactggagagcagtgatgcgatcacagctcactgcagcctcgaactcttaggctcaggggatcctcccacctactgagtagctgagaccacaggtacatgccactgtacctggctaatttttgttttttgtagagacagagtctcactgatgttgcctaggctggtctggaactcctgggctcaaataatcctcccgccttggtcacccaaaatgttgggattacaggcgtgagccacggtgcccagctgagccttgatatttaaatagtggtctggggaccagcaacactgacatctgctgggaggttgttagaattgtagaatttcaggtcccacctcagacctattgattatttccatattaacaagattcacaggtgatttgtatgcacatttcagtttgagaaggactggtttagaatggaagataaaaaatggcagataaggctgggcacggtggctcatgcctgtaatcctagcactttgggaggccaaggcgggaggatcacaaggtcaggagttcaagaccagcctggccaacatggagaaaccccatctctactaaaaaaaaagaaaaaaagaaaaaattagccgggcgcagtggtggaagcgtgtaatcccagctacttgggaggctgaggcaggaaaattgctggaacccaggaggcagaggttgcagtgagccgagatcgtgccaatgcactccaacctaggcaacaagagcaagactccgtctcaaaaaaaaaaaaagacagataaggtgttaaataccttcagttcaattagggattgatgagagatggtgtgacctaaaacattgttctgggttgaatttggccttgttgcctggactgtcaatattgtggtgtttatcctcttagggaagagarctccaaagaccaggtcatctccttaatttgcttctctcaccaggtgtgggaatccagattgccccaaaatcttgagctgttaaggctgggaagagcctgagatgccatcagttcagctcaatccctagctgctgccctgctcacttctgccaacccccgtctcacaggcgaggctctgggaagggcagtggtttgctcaaaccacaaatcagcccagggctggccacagtcctgggtcccagccagtagttatcttttctctaagttttggtccattatttttctatctcatggatttatcctaactttttagaaaaatgaattttaaaaacatatatgggttcatattagaaaagtatcattgtagcaggatgagcctcagacaagaacccctcagaaaccgagttgtagaaggaaagggctttattcagctgggagcatcggtggattcacgtctccaaaagccgagctccccgagtgagcaattcctgtcccttttaagggcttacaactctaaggcggtccgcgtgagagggtcgtgatcgattgagtaagcagagggtacgtgactgggggctgcatgcactggtaatcagaacggaaaggaagaggacagggattttcacgacgcttttccatacaatgtctgaaatctatagataacagaagagttaggtcggggttgatttttaactccaggcccagggtgcagtgctgggctatctgcctgtggattccatttctgccttttagtttttactacttctttctttggattcagaaattgggcataagacaatatgaggggtggtctcctcccttatcatgtgcttactgtaaaaaaatcagagttgggcacagtggctcacacctgtaatcccagcactttgggaggctgaggcgggagaatcacttgagcccaggagtgcaagaccagcctgagcaacacagtgagtccctatctctacagaaaaaaaaagaaaaatcaaaagttatccaggcaagatggtgtgcgcctatggtccagcctactcaagaggctgaggctggaggatggcttgagcccagaaggtcaaggctgcagtgagccatgatcgcaccattgcactccagcctgtgtgacagaacgagaccctgtctcaaaaaaaagaaagctttaaaagggtgaattttgtatgtgtgattcatatctcagtaaagctgttattaaaaaaaataaataaataaaagcaggccgccgggcatagtggctcacacctgtaatcccagcactttgggaggctgaggtgggcagattacctgaggtcaggagtttgagaccaacctggccaacatgatgaagccccgtatttactaaaaatacaaaaattagtgggaatagtggtgggtgcctgtaatcacagctactcaggaggctgaggcaggagaatcgcttgaacctgggaggcagaagttgcagtgggccaagattgccccactgcactccagcctgggcaatagagtgagactccatctcagaaaaaaaaaaaaaaaagctagagagaagaaagtaaaatatcctttgagtcacccaaccccagactgcaagtagccactcattcattccacaaatactctctgagggcctgttctatgcaggctatgtgccaagggtttacaccctaggagcagtgccaccccagtatctgtcccccgtgaccagtgactgcccctcctctataatatctattgactgacctctctgacctcacctcatttctttcctccagtgccccggctccag

SEQ ID NO: 95272 - DNA, 25825 bp, Homo sapiens
ggaccaatatcaagttttatgcttgatatttgcgtatttgctacatggaataataatcagaacttttaaagaatgatctcttcaaattcttgatacccttgagctcaaggaggtaatacaaatcctaaaataaatgttaaattcaaaaatttacagaagttgaaattgtcttttctttcattaacaaatgtacaattgaaatttcttgtgataacatgaatggatttttattttttattttatttaattttttttttgagacagagtctcactctgtcacccaggctggagtgcagtggtgcgatctcgtctcactacaacctccacctcctgggttcaagtgattctcctgcctcagcctcctgagtaggtgggattacaggcgtgcaccaccatgcccggctaatttttgtatttttagcagagacagcatttcaccatgttggtaaggttggtctcaaactcctgaccttgtgatccgcctgccttggcctcacaaagtgctgggattacaggtgtgagccaccgcacctggccagatttttatttatttatttttatttttatttttttgagtcggagtctcgctctgtcacccaggctggagtgcaatggtgcaatcttggctcactgcaatctccgcctcccgggttcaaacaattcttctgcctcagcctcctgagtagctgggattacaggtgcctgccaccacgcccagctaatttttgtatttttagtagagatggggtttcaccatattggccagactagtctcttggtcaggctggtctcgaactcctgacctcgtgatctgcctgccttgggcctcccaaagtgctgggattacaggcgtgagccaccacgcctggcccaatctggatttttatttatttatttagagacagattttcactctgttacccaggttggagtgcagtggtgcgatcatggctcactgcagcatctctctacctcctgggctcaagcaatcctcccacctcagtctcctgagtagctaggacaagaggcatgcatcaccatgcccagctaacttttttttagattttttcgtagagataagttctcactatgttgcccaggttggtctcaaactcctggtctcaagcaatcctgccatcttggcctcccaaagtgctaggattataggcatgagccaccacacccagctaaacacatttttctttttttgagacagggtttctctctgtcgcccagctgcagtacagtggcactatctcggctcactgcaacctctgcctcccgggttcaagtgattctcgtgcctcagcctcttgagtagctgggactacaggcgcctgccaccatgccccggtaattcttgcatttttagtagagatggggttttaccatcttggccaggctggtcttgaactcctgacctcaagtgatctgccaccctcggcctcccagagtgctgggattacaggtgtgagccaccacacctagctgaaaacatttgatagattctaattctgtagtttgggatggggtccaggaatctgaattttaacagacactccaggaaatcgatgtaaatgtttctcacaaacaatactatgaaaccactgactgaagctagcagttctcagatgttttcgcttttttaaatctcaagactcctttacactattacaattattgaggccaggtgtggtggctcacacctgtaatcctaacactttgggaggccaaggtgggaggatcccttgaggagttcaagaccagcctggacaacatagtgagaccctcataattacaaaaaaaatttaaaaaatattagccagttgaggtggcatgagcctgtggtcccagctactcaggaggctgaggtgggaggatcagttgagtcctaggattcaaggctgcagtgagccacgacagtaccactgcactgcagcctgggagacagagccagaccctgtctctcaaaaaagttaaaaaaaattactgaggatctcagaaagcttttgttatgtgggatatatctgttgatatatacaggattataaattaaaacaggcacacacacaacaaagaaaaaaaggctgagcacagtggctcatacttgtattcccaacactttgagaagctgaggtagcagtattgcttgcatccaggagtttaagaccagcctgggaaacgtagtgaggcccaccatctctttttttggtttgtttttttgagacagggtctcactttgtctcccaggctggaacgaagtggtgcaatcacagctcactgcagctttacctccctgggctcaggtgatgctcccatctcagccttctgagtagctagtgagaggtgaagccggctgggcttctgggtcaggtggggacttggagaacttttctgtctagctaaaggattgtaaatgcaccaatgagcactctgtgtctagctaaaggtttgtaaacgcaccaatcagcactctgtctaaacagaccaatcagctttctgtaaaatggaccaatcagcaggatgtgggtggggccagataagggaataaaagcaggctgccggaaccagcggcaccaagctggtcggggagtcttccaaattgtggaaacgttgtttgtaaaccttgttcttctgctctttgcaatagctcttgctgctgctcactctttgggtctgtgccgccttcatgagctgtgacactcaccgtgaagttttgcagcttcgctcctaaagccagcgagaccacgaacccactgggagggacagcaactctggacgcgccacttttacgaactgtagcactcaccgcaaaggtctgcagcttcactcctgaggccagcgagaccacgaacccaccgtgaaggaacgaacaactccagacgcgccgcctttaagagctgtaacactgcaaaggtctgcagcttcactcctgaagtcagcgtagaccacgaacctagcagaaggaagaaacttcggacacatctgaacatctgaaggaacaaactccggacacactatctttaagaactgtaacaccgcgagggtctgtggcttcattcttgaagtcagcgagacaaagaacccaccaattcgatacactgggaccacaggtgtgcaccaccagtcttggctaacttttgtattctttgtagagacaggatttccccatgttggccaggctggtctcaagctcctggactcaagccatgtgcctgccttggtctcacaaagtgctaggattacgggcatgaggcaccgcacccagtgagaccctatttctacaaaaaatacaaaaattagctgggcatagttgtgtgcacctgtagtcctagctacttgggaggctgaggcagaaggattgctcaagcccagggggtggaggctgcagtgagctatgactgtaccacagcaccacagccttcatgacagagcgagacttctatctcccttaaaaaaaaaaaaagttcagggtcttttgagggtgggcttctactgaacattggacatgtggagctgagggctggggtggagcactgcaggcagacagaaaagcatgaacaaaggaaaggaggcaagaaagtgggggctgaggcagctgaccatgggctggaggaacaagcccgtggagctgcagaaggggaaacacaggaagaattggctccaggaagcattaccgggcaggcatatgtatggtgatactagtgagagtgagatcagctggaaagctggggtgggaaggcctggaccagagtaacagcagaggaaatgagcagaaggcttgggggcaggaaaccatcaggacttcttaaatttgggggcgtagagcaggatcagagacagggaggtggaaagtcgctggctgaacttgcagcccaccccaggtgctgtcaagcatccaggtcagggttagaaattggtcgcctggagctcagggctgggatttgggcttgtggttgacctgcctatgggtgaaagtcatcacctccgtattaaaagggattgccagccgagaaggagccacgaaggtggaaggagaccaggggagtcccagtcaagaggccgcctgaggaacgtttcaaggagagagggtgctcagcagtagtggatgttggggacacctcattggaacgcctggcacatagcggacactcaatatttgtgagctgaatgaaagaaaaacccggagtaagaacatgatacattcaggacaagcaacatgaaagaaatagcagttgaatttgggagtcaagagaataactgagaccctttaagtggcataagggagaaaaaaaggaaaaaataactgagagattgttgcatttgttccagaaaatggctgggacctgccccaaggccaacactaagcactgataattgaccattaggaaactctgtcccgacctgcagagtggaggctccactccagagtggaggctggagtggtgtggggtttaatgtgcaacctttttttttttttttgacagagtcttgctgtgttgcccaggctggagtgcagtggcgcgatcttggctcactgcaaactccgccctcccgggttcacgtcattctcccgcctcaggctcccgaatagctggtactacaggtgcccaccaccacgcctggctaattttttgtatttttagtagagatggggtttcaccatgttagccaagatggtctcatctcctgacctcatgatccgcccacctcggcctcccaaagtgctgggattacaggtgtgagccaccgcgcctggcctaatgtgcaacctttgtgtagaggttgcaacgtaaatgcaaatgtgagccttttccattcaatctcaacatttagagatcagaaaaaataatatatataatactgctaaatggctcacataattccattacaaatcacttctttctttccacgtgtgtttttctttccccttagaaataaagaggatgtaacaggttctctggcactgtgaccttccttacagcttgcctgtaagtcctttatttatttatttatttatttatttatttatttatttatttttgagacggagtcttgctctgttgcccaggctggagtgcagtggcctgatctcagctcactgcaagctccgcctcccgggttcatgccattctcctgcctcagcctcccaagtagctgggactacaggcacctgccaccatgcccggctaaatttttgtacttttagtagagatggggtttcaccgtgttagccaggatggtctcgatctcctgacctcgtgatccgcccgcctcagcctcccaaagtgctgggattacaggcgtgagccaccgcccctggcctctagtccttttttaacaaggttatttaaaaagactttactggccaggcgcgatggctcacgcttgtagtcccaactactcgggaggctgaggtgagacgattgcttgagcccagcagtttgaggctgcagtgagctatgattgtgccactgcactccagcctgagcaacacagcaagaccctgtctcaaaataactagctagctagctaagtagctaactaactttactgcttcttgagattcctatccctggacatttaaaaatacattatttaaaaaaatgcatttcctatttttctggcttagagaaagatcattttccttcatatctttctggctttaaaaatattactctggggtggctgctgtggctcacacctgtaatcccagcactttgggaggccaaggtgggagaatcacttgagtccagaagttggagaccagtctgggcaacacagtgagaccgtctctataaaaacaaacaattactctgaatgggagaagaggctgctgaaggccacagtggggagcagggcgcagacacccctggcacagtgccggccagtgggcacccccagcctgactctatttgccagaggctgaagtccagaggggttgaggggagagcacggcaggtcctggggcccctcccccgccttgatccyagggcgcccctgacctttgagccggctcgggttccggctctggcgcgtgcacactcgcctcgccgttcgggaccagccagatcgcggcggcctcgcgggcggtttggtcggtgaggtcttggccgcgcgcggcaatgctgaggctgctggcgtccgggtgcgcccggggcccggggcccggcgtgggcgcgcgtcctgccgcagggctctttcatccggggcgccgccagagccgccaggcttccgaygcgccccggaaccagccccccagccccgagttcgtggcccggccggtgggcgtctgctccatgatgcgcctgccggtgcagacctcccccgaggggctggacgctgccttcatcggggtgcccctggatactgggacctccaaccggcctggggcgaggtaaggccggaaggacgggggccgggtacacgtggagggactgcttgctggctgtcgggcatggaaagcaccgagacaggcgcccctgctggccccgggtcgagttggaagctggtggccggctccaaaatgccccttatggtttgagatggttgatttacctggaccctcaataagcaaaccccagggctcaacatgggcgtggcctcccacatcttagtgtcatcattggtcaagaagggattttggccggcccggtggctcatgcctgtaatcccagcactttgggaggctgaggcgggcggatcacgaggtcaggagttcgagaccatcctgaccaacatggtgaaactctgtctctacaaaggtacaaaaaaaagaaaaaaaaagccgggcatggtggcgcgggcctgtaatcccagctactcgggaggctgaggcaggagaatcgcttgaacccgggagacggaggttgcagtgagctgagattgcgccactgcgctccagcctgggcaacagagtgagactccgtctcaaaaaaagaaaaaagaagggattctggagcctgaaccttctctgtgtccccatcctggggccttgctgggatggctgctgtggattcctcccctctcctctccccagcttacagtggcaggtgacattgcatttgagagcagaaactggctgccccttccccaaatctgaagatgtcacctgactcaagaaatgctcaaatgaaggcaattttcctaggatcaagtcggaggaagcaaaattcatcttcctagttattgaacgtcagcaatttctgattcagctcagcaacactatatctgaccgtactgatctgaattatgaaagccagcacttattaaatgtctcctaagtgcaaggtgctttgcatagattacctcatttaatttttactacagtgcaaggtaaatattttacaaattaggaaactgagactcaggtagatcatgaaattcactaatgccatttagtacacttatttagtctcttcgatacatagcctagatcggtgattctcaagtggggcggttttgcactccggggacatttggcagtatctggaggcgttttgggttgttacaccttggaggaagggtgctactggcacctagtgagtacaggccgggatgctgctaarcattccattatgcaatrccgcgacacggaatcatctggccccaaattgctgaggctgagaagccctggcctaagcaaagcctgaaatctctgcagatgatggctgacaggatgattcttccttcygcagattcggacctcgccgcatccrggaagaatcagtgatgcttsggacagtcaatcctagcacgggggccctccccttccagtccctcatggttgcagacctaggcgatgtgaatgtcaatctttacaaccttcaggacagctgccggcraattcaagaggcctatgagaaaattgtagcagctggctgtattcctctgaccttgggtaatgtcagtctgcaagagccagagtagttccctgcactcagggtttacttatcctgtactcaggggcttgagtacagctacttctcccctgcaagccactgcaaatgtgcagacagtaggaaagagagcattgtaattyatttattttaatccctggggagagaatatttcacgtgtgtgtgtatgtgtgtgtgtgagacagtctsactctgttacccagactggagtgcagtggtgcaatctcrgcacattgcaacctccacttcctgggttcaagcaattctcctgcctcagcctcccaagtagctgggattacaggcgcccaccaccatgcctggctaatttttgtatttttggtagagtcggggttttgccatgttggccaggctggtcttgaactcctgacctcaagtgatccgcccaccttggcctcccaaagtgctgggrttacaggcatgagccaccgcgccyggccaagatgatgtttctaatgactttatttgcgaggagaactgcaaagagggtgtttttgtcctgctcagggtctacatcaacctatagggcagctttccccttatcctcacccctgacccactctcactttttctcttgttcacaaatacttaaaatgacagggatcttttcctaaatatccaaattcatttttgccaagttagagagcctagcctgcatggcatagtggsaggagtgtggtttcccgatggcatggtttgaagtctcagctgcacttctccctagcaatgttgctgtataccgtgcttgatgcttcacaccctcacctgtaagatgggaatgatcacagtaacacctactcactgcatgatgtgaggggcatataatgaaagtgcacatgaaatgcccagcatcaagcatggcatatcttttttttttttctttttttttgagacagaatttcactcttgttgcccaggctggagtgcaatggcacgatctcggctcactgcaacctccgcctcccgggttcaagcaattctgtctcagcctcctgaatagctgggattataggcgcccgccagcatgcccggctaatttttatatttttagtagagacggggtttcatcatattggtcaggctggtctcgaactcctgacctcaggtgatctgcccacctcggccttccaaagtgttgggattacaggcgtgagccattgcgcccgacctatgcatggcatatctgaagcttcaataaatgttaactgttattattatcagaaagaatactttcctaggtctgtgctgtccagtaaggtagccactagccacatgtggctacttaaattctttttttttttgagacagagttttgctcttgttgtcccgcttggctcacggcaacctccgcctcctgggtccaagtgattctcctgcctcagcctcctgaatagctgggattacaggcrcgtgccaccacgcccagctaatttgttgcatttttagtagaaatagggtttcaacatgttggcaaggctggtctcgaactcctgacctcaggtgatccrccgcctcagcktcccaaartgctgggattacaggcrtgagccaccacgcccggcctaaattcaaattaattaaaataaaatattcagtttcttagtcatattagctacatgtatgtcacatgtgtgtcacatgtggatagtggctaccatatgggccagtgcagatagaacattgtcatcatcatagaaggttctattgaacagagctattctaggcattttcctagaatactstgaaaaggcaattcctagagtagctcttaacttgtctaatttcctcttttatttatttatttttgagacacggtctcactctgtcacccaggctggagtgcagtggtgccgacatggctcgctgcaaccttgccctccctgggctcaggtgatccttccactccagcctcccgagtagctgggtctacaggcgtttgtcaccatgcccagctaatttttgtattttttgcaaagacggggtcttaatgtattacccaggtggaccttgaattcctgggctcaggcgatctgcttgtcttggcctcccaaggtgtgagccactgygcctggtctatttttatttttattttttagagacgtggtcttgctgtgttgcccaggctggtctcaaacttctaggctcaagctatttatttatttattttattttattttttgagatggagtttcacccttgttgcctaggctggagtgcagtggcgcgatcttggctcaccgcaacctccgcttcctgggttcaagtgattctcctgcctcagcctccagagtagccgggattacaggcatgcgctaccatgcccggctaattttgtattttcagtagagacggggtttctccatgttggtcaggctggtcttgaactcccaacatcaggtgacctgcccrccttggcctcccaaactgctgggattacaggcatgagccaccgtgcccagcaagctattcatttttttgagatagtgtcttactctgtcgcccaggttggagtgcagtggcacgatcacagcttactgcagccttgacctcccaggctcattcagcatcctgccattctataagatcttactgtagctgtggttataactccccccaggctgaaagggtgaaaattgagttaagattattcagctgggcatggtggctcatgcctgtaatcctagcactttgggaggccaaggcgagtggatcacttgaggtcaggagtttgagaccagtctgaccaacatggtgaaactccgtctctactaaaaatacaaaattagccaggtatggtggtacacacctgtaatcccagctactcgggaggctgaggcaggagratcgcttgaacctgggaggcagaggttgcagtgagccgagattgtgccattgaactccagcctggacaacagagcaaaactacatctcaaaaaaaaaaaaaaaaaaaaaagattattctatgtaatcctccaattcactttccagatgttttcttcttcctctttgcaggtggagatcacacaatcacatatcccatattgcaagcgatggcaaaaaagtaagtctcaaatggcttgggcccagcaagatttcaaaagccagaagctagggaatgagttatttgctgtttggtggcattaggtgactgctgctggctcaggttatgagctgcttctggggatcaaaattaaggttgagctccaggtgtctctgtcagtcagcagctagaagccaagacaatttattattaacagttctggccaccctcccttgccctagatctctcctggtatgtgtgctcagcattttcaacttgcttctgtttttggaagatgagcctctagtgaaatacacaacctcagttaacttcagtttctgttttgcttcaatggccaaaaacaaacactgacaggcacaatggtggaccttgctgagaggcccttgtttcctcctgaaagggcacctttctcaatcaaaagactgatttgccagtagtggaagtctacccaggattggccgactttggctaatttagtttgagaaagagacagaaggacccgggtggagggtggcagctccagaatgtgtctgtggaagcacatgtgggtggcattctggttggaggtgggagggtgcaggtctttgctcaaagctgcatttattcctcacggatttggatcagatgtttattttgggtggctggcaggggttgatggaggttatggagagagctggattaaagcttcctcttcctcggttggagaaagggtgtgtcttggtttagttaagccttcagccaagctcccctgtgccaccacccttgattctcatcctgtctctaagtgaagcaaattctgggtgataggtgtgggtggcagccaaaacatgtctatttcctgcctgacttctgtgagtttattgttcctctgagatgcaaagtgatctcaagaagacaggaaccagttgcaaggcagaaaacggatgccaggtctcccctttttggctgtgaattgtcaccaagttttggtggcccgaagggtggctgtgctagggccccacagggagggttggcctctgagctgccctgttgtcatcaggcatggcccagtggggctgctgcacgtggatgcgcacacggacacgacygacaaggccctaggagagaagctctaccacggggcgcccttccgccggtgtgtggatgagggtctcctggactgtaagcgtgtggtgcagattggcatccggggctcttccacgaccttggatccctacagatacaaccggagccaggtgacagaccgaatgccccccacccttgcccctcaaaatgtcttcctctccgttgcctcaccagtggcarccagggattgagcgggggctttactaatcaagtctgaagcagggatacaaggctgagtttgcatcatcaggggcatawggagcataggagtgaggaagttggtttatgggccatgggaagtctatcgctgggcgggggagacaagcagaaatcgaccaacccctcrgacggtgctggcttagaagaggggaggaggccgggcacagtggctcacacctgtaatcccagcactttgggaggctaaggtgggtggatcacctgaggtcaggagttcgagaccagcctggccaacatggtgaaaccccgtctctcctaaaaatacaaaaattagccaggtgtggcggtgcgcacctgtaatcccagctactcgggagactgaggcaggagaattgcttgaacgtgggaggtggaggttgcagtgagctgagatcgcgccactgcactctagcctaggtgacaaagtgagactccatctcaaaagaaaaaaaaaagaggggaggaagtccggacccaagatgagttgccaccttcttagttctggtcctcgtaccctctaggcagaatggctctcagatagacgtgtatgacaagaccccaatggaacagacccaaatcccttgcttttagagcgtgccaaggccagtcttctggacagagcaattcaaaaggtgctagcgtgagctgctgtttcccactcttgctttagcaaagcttctctctgattccaactccatcagtcagctttgaccctgcttccttaccactcattgtccctcccttcctcacctgtaaaataggatagttccctcttcatggagatggagggtcaagtgtcatgtgcacacagagctgagcatggggctggcaaacaggaaatgccctgtaaatgctgccagacagaaacctcagtccctgtctctgcagggcttccgggtagtcctggctgaagactgctggatgaagtcrctggttcctctgatgggggaagtcaggcagcagatgggaggcaaacccatttatatcagctttgatattgacgctctggatcctgcctatgcgccagggacagggacacctgaaattgctggtctcactcctagtcaggtaaggagattccaccagtgaagatcctgggggtggagacacttaacacccattttcctgggacttgaagcgaatctttaggaatcaggataggatttttgtttgtttgtttgagacggagtctcactctgtcgcccaggctggagtgcagtggtgcgatctcggctcactgcaacctccgcctcccaggttcaagcgattctcctgcctcagcctcctgagtagctgagattacaggcacatgccactacgcccggctaatttttgtatttttagtagagatggggtttcaccatgttggtcaggctggtcttgaactcctgatctcgtgatccactcacctcggcttcccaaagtgctgggattacgggtgtcagccaccgcgcctggctgccaaggtaggattttaagagcagagcacctaggccttttctgttctctgggctgaggataagtttgaataccctcttactgaagggtgattgattttggcaagggccttcatttcctatctgggatataatagtcccttattttgtcctttatttgctcttcctgccttcagttcatctgtcatgaaaacaacagttcataggaacaacattatagtatcctctcttaagaacactaaacttggccgggcacggtggctcacgtctataatcccagcactttgggaggctgaggtgggtggatcacgaggtcaggagatcgagaccatcttggctaacacggtgaaactccgtctctactaaaaatacaaaaaaattagccgggcgcggtggcgggtgcctgtaatctcagctactcaggaggctgaggcaggagaatggcatgaacccgggaggcagagcttgcagtgagccgagatagaaccactgcagtctggcctgggcgaaagagtgaaactccatctcaaaaaaaaaaaaaaaaaaaaaaaaaaagaacactaaacttggccaggtgtcgtggctcacgcctggaatcccagcactctgggaggccgaggcgggtggatcacaaggtcaggagttcgagaccagcctagccaagatggtgaaaccctgtctctactaaaagtacaaaaatcagcccggcacggtggcaggcgtctgtaatcccagctacttgggaggctgaggcaggagaattgcttgaaccctggaggcggaggttgcagtgagctgagatcgtgccactgtactccagcctgggcaacagagcaagactccacctcaaaaaaaaaaccaaccaaccaaccaaacaaaaacactaaacttggccgggcgcagtggctcacacctgtaatcccagcactttgggaggccaaggcatcaggcgggtggttcacctgaggtagggagtttgagaccagcctaacatggagaaaccccatttctactaaaaatacaaaattagccgggcatggtggcgcatgcctgtaatcccagctactcgggaggctgaggcaggggaatcacttgaacctgggaggctgaggttgtggtgagccgagatcatgatattgcactccagtctgggcaacaagagtgaaactccatctcaaaacaaacaaaaacactaaacttatctttttagggttaaatttaaataaaagtgcatacaacgggccaggcgcggtggctcaggcactatcctcagcactttgggaggccagggtggatggatcgtttgagcccaggagtttcagcccagcctgggcaacatagtgagatcccatctttactaaaaataaaaataaaaattagtctggtgtgctagtgtgcacctgtagtcccagctactagggaggctggggcaggaggatcaactgagcctggcaggtcaagccttcagtgagccgtgatcataccactgcactatagcccgggtgacagagaccctgtctcaaaaataaataaataaataaataaataaataaataaataaataaaagtgcatgtgatggcacaattacctgccaaggtaagctcaagagttttagaaacacccaaataaagctccaataatgtgtgctgggagtaaatgcacgggggcagaatggttatgactagaatctccccaagggcaggacctatgtattgttccctaccttgtccttggagcctaggacagtgcctaatacaaatagtaggcactcaaagacatttgagagtaaatgaatgaagactgcttaaacctaatcaagtaccttacatcctctaagatcttaaaggagggtggccataactctctctcttgaaatggctgtaaccatcctctcttctcatgagggatttctgaaacacattcctcatccctctgcttagcaaccttctgggcttttcacctgcaggatgggaaccctttcagacaaggtcactctcttcccatcagtctccctcacttactctgtcttctggccacatcttactacctgaacttttcccatcttggtgcctttgcctgtgtttttccctctgcctggcctatcccttgaactgggtatttccaccttggggaagccttacccacctctccaggctattacctatgctgataccattctgggcttgctttycttgaakcccttggtgcatgacattgaaacgattggtttccttgtctccatcaccacaccatgcagccctgaggagcagggactgtgtacgcattatctgtttctctgggaggcctgccagtgtgcctggcagtcaacaaatgtttatggagggaaagccaattccaagtcaaagggtggcgtgggctgggaaaagctctactgggtgcttttcactgtaaatgattaccactgtggacaactcagtcttgatcttgaataggctctggagatcatcaggggttgtcaaggcctgaaygtgatgggctgtgatcttgtcgaagtttcaccaccgtatgatctttctggtgagtaagcaaagagactgagatccatgggcagccggtagcttaaattacacgaagctagttaataagtagaaaatggggccaggcatggtggcccaagcctgtaatcccagcactttgggaggccaagrtgggcagctcacctgaggtcaggagttcaagaccaatttggccaacatggcgaaaccccatctytctaaagatataaaaattagccaggtgtggtggcacacacctgtaatcccaggtactcaggaggctaaggcaggagaatcgcttagaacctaggaggcggaggttgcagtgagctgagattgcgccactgcactccagcctgggtgacagagcgagactccatctcaaaaaaaaaaaaaaaaagatgagtcccttatatgacttggggaagcagctgagcatgtccaatggtgaagaaaacacacctattactgcacaccttacaaacatgagctcattaaccctaacaaaacccccaggaggtagttaagtatcattagcttgcccaccaatcagcagaagagaaagaaaccagcctgtagtctagtgacagggtggcccaatccccgtctcctttgatgtttcattgcaaagtgaattctaaagcataaataatatatgttaatatttatcaaataggaacttagctggttaagatcttcaaagcagacgccatcccaataattttaatgtagacaaacttatggaattaggcctatcgacctcagaggatagataatacagtacacatcattattataggttctcctttgggaaaaatctgttctcagagtaaacaaagaactttctgaattttaaaatatgattcccaaatgatgcttgatggaggcagagagcctgggcaagcgtgttcacagctggcgggcaccctagaggggtgcacaagacagggctctggaaaaggaggcacaagggraagagaaagctgaggagtcccaaggcttggctcagcgggtygtctgcagggtattcatgtgaggttttactttttcttagggaacacagccctgctggcggctaacctgctgtttgagatgctatgtgctctccccaaagtgacaaccgtctgagtcttgtgctcttcaagacaaaacagattgcgtcgctgacaagttctcaagaagaacttatgagtaagcagtctgagaactaaagagtttatgccaagaaaactttctgctgaaagtgtcattgctggctgtgaagtcgggataatcagtagaattctcacccaaacagcaacatttctaaggaacttggattaattgggggaaaaaaaaaggagtacttgtactgctttgattttttttcctttgatgaaagatggaggataaaggggaagtgaggagaatttctttcaagattatctaaacattagaaacatgacatttaaaaaaactatgaaataatactgtataagcattccatatttctatatcttccttttaaacwtttttttttttgagatagagttttgcttgtcacccaggctggagtgcaatggcatgatctcggttcattgcaacctccgcctcccgagttcaatcgattctcctgcctcagcctcctgagtacctgggattacaggtgcctgccaccacgcctggctaatttttgtatttttagtagagacagggtttcaccacattggccaggctggtcttgaactcctgacctaaggtgatccgcccgcctcagcctccttaaagtgctgggattacaggcatgagccaccgcrcccagccgctttttaaaattttgatgatctgcttcctagagtattgagtatcttcctttaaactacagctcctcctcggacgctgcagtgagctgagatcgcaccactgcactccagcctgggtgccagagcaagactccatctcaaaaaaaaaaaaaaaaaatacagcttctcctatgaggtgcttagggctgcatcttggttttaggaccactgtgaacgtaagtaaaaagtataaagtaacacggagagcctaatgaagaaacttcttgctcagaggcctagaagggtacacaaaatgtcttctaaactagaaaacctaaggctggacacggtggctcatgcctgtaatcccagcactttggggggcggaggtgggcagatcacttgaggtcaggagttcgagaccagcctggccaacatggtgaaaacccatctctactgaaaatacagaagttagctgggcgtggtggcgcgtgcctatagtcccagctactcaggaagctgaggcaggggcattgcttgaacccgggaggtggaggttgcagtgagctgaggtcatgccactacactccagcctgggtgacagagtgagactccgtctccaaaaaaaaaaaaaaaaaaaaaaaaagcaggccggacccagtggctcacgcctgtaatcccaggcctaggcgggaggatcacctgaggtcaggagttcaagaccagcctggccaacatggtgaaaccccgtctctactaaaaaacaaaacaaaacaaaacaaaacaaaaaaaccccagaaaacaaaacaaaactggaaaatgtcagctgggcttttttttttttttttttttctgagatggagtctcgctctgtcccccaggctggagtgcagtggcccgatcttagctcactgcaatctccgcctcctgggttcaagcaattctgctgcctcagcctcctgagtagctagaattacagtcatgcgtcaccacgcccggctaatttttgtatttttagtagagacggggtttcaccatgttggccaggctggcagctgggctcttaatgttacttattgtaactcacttcctgtaagactcaatctactcttcaagttgatgtaccctctatgactgtaattcctgaaatctgcagttatgctgtggtgatcttaagcgtgtcttgagttccatgcaaattcaattctgttgataatgtgtccataatcaaatcatcatcttgcaatgcaagggctaccccataattatcagacattaaaatagtttatttctttttccattctgtaatcttaaaataacatcagcttcagtgcctgttcacaatacaaaaaaagtcaaaaaacaaaaacaacacccaaaacataaaaaagaaacaatttgccaaataagttatttgttcctaagagtatcaaaagtgcaaaatattcaccttcttttcagatctctcccaagcataattatcctccttgacaaactgaacagacagattcagcagctgccacactgcacttgtttttaggggacaatgtcagacaggtggatgtgaactacagttcctctgtaaagatgtttggcatcagcttttaaagaattctagttaacaaaacaggtctgagtatgtgcttccaatctctattcccaaacaaaggaaatcactaaaaaaacagatcacacttctttttataacagaaaaatatttatgtaatgatggcagctgcaaattgattgggatgttaataaataaaaaggaacaagtatcaacaagctgcaaatgaggaagaaaccaacctacctgaaaactacaaccaaattctcatggctaataagtgatggcagtgagaccatggcccctaatggaagttagggcagcctcacccactgaaatgttgtttagttggagctgatagcctcagtgttagataaaaattgtgcaacacctgagcaacaaatttttttttttttttggaaattggcatgtattctgcaaagacttgttttaggccagttttaccccatctgctaaacgcaatgcatagtctgtatcaaccagaagaacccatctctaaaaacatcaatgttgatagtcaaagaccactgtgttagaaccaaaatcaggtcttgtatgattacatacatcagacagagcaatggtggcacaggctgagcatgacaatggctcatatgtttgacgcaaaagtaaacaaattcatggatgcattcaggaggaatgccttgcatggacaagggtaaagttcaatttaaaataaaagctccctaatattctcatagggcaccagctctaaaccggtctgtagaagagcttttgggctgaaacatctgccaggaacattgccaatcccatcactaccttcatttcctagtgcaaatggaaggtgcagctgtttgaaggtgctttttaaaagatcaaaagatgacttgaagagataaaaatrtttaaaaatgaacaaatctggcatggtggctcatattgataatcccagcactttgggaggccaaggtggaaggactgcttgaggccaggagtttgggaccagcctgggcaacatagcaagacctcgtctctattaaaaaaaatataaataaatacacttggagagtttttggttttcagaaattaaagtcaggaatttcattagtacagaaattaaaaataaaaacctactaccaaaccaaaagaccactcatataagcaatctggccataaaatacctagaaagtaatattgaggactgatgtatcaaggagccaaatgaattccttgaccatttctagttggaccaggtgccatgagatacagcattcagaggaagtgtccatttttagaggatcatatggaagaatgaagcctggcagtgatttattttttaataaagctacagactccatgaaaactacaggaattcctggccttaaataatwtattacttaccaatgtagctcaagatttaaattattcaggatccaagtggcttagtttaaagcattaagattaaagaaatactaacttagccgggagtggtggctcacgcctgtaatcccagcagcactttgggaggctgaggcaggcagatcacctgaggtcaggagttcatgaccagcctgatcaacatggagaaatcccgtctctactaaaaatacaaaattagccgggctaattacatggtggcacatgcctgtaatcctagctactcaggaggctgaggcaggagaatcacttgaacctgggatgtggaggttgcggtgaaccgagatcgcaccatttcactccagcctgggcaacaagagtgaaactctgtctcaacaactaaaaaaaaaaaaaaaaaaaagaaatacttagtaaatgtcccatcactgattttcacccttcacaaagccaccaaaggcaccttgctttgacatttgaacggaccactctttgaagctgtccaaactcaaactcagaaccactggtcattctgccctgaaaaataaaaggtatgctctctaactggctggtatgaggcaccctggggtccactatacctggagctcagcacgctcaggtgctgatggccagtctgaccccaatactggtgaagcagctctaagttaagagtgaaaacaatgaagatgagacatcaaaatacagcccagaagtggaaagtaagccttttgcaaaatgggagtctagaacaaatcttggctcacttcctgcaaaagatgacttgaagagacagcacttttagggtaacagtgttcaaaatacaattgttgagaaattttaagttccttgatacaaagacatgtttggtattttactaaagagacactattgaagagattccttaagcctgactcatagcaggtgggaataatttctcttcagtttaacatctactggctttatagcagcttatctctacgttcagagaacaagattacaagttatggctcctaatatccataccctaaaatcgacagaggcagaaaggcatctgaagacatacatgtcaacggctcaaagtcatcacagtacttctcgctgtgcagacccctcccctggctaccagcagcgctggggcggcggatgggatgctcacagcgtgtctcaaggctgcatcgcttcagccactgctcagcctccctttccttttcttgagaactcacatgcagaactcccgtttattcctttccttttcaacctgtggccaacaaactgttgttgggggatacccccaaaatatacatttagccacttactcccagaacaaccagtaaacgtgagattgcttggaaaggggcctttttccagatgcggggctagaagctgccgtgggttgttcagagttaggagcatgcgccatggcagcagcacagcagggccgggattggggaaggggccaatgacctggcctgcacgacaggctcatgagggtccgccagatgccgcttgcagggtggagccctgtgcttctccaagacacaggacaggagggtggggtgagcatgggacaaggacaagaaaggaagaggggatgagcagtctattttcaatggtgtggcattcagtggggaaaaataacacccagaggaaaagattttcatctaggcgattcaaactggtggtgtttttcattcctaggttagaacaggacaaaggaaagattcttctagccatggttctagaagagcaatctaaaatctatactctgttcattgtggtagtttgagtcctgaaaatacctgttcacaggggcatgttaaaaagtctgaagagttcaaatctctttggaaaatcctctcagtctagttcaggccatgatgggatataaaacctctgtaaggagccctccagcaggcgttccatccataaagagagcttgctcaactttcctttgatgggcctggatccaaggccacaggaaggtttccctcgagattcacccaggtagagggaagagtcaacatcactgcacgaccctatggcttcctcctcttcgactgtcttttggggcttgaagaggcagaagtatttcttgtggccattcagagccagtacataaccagtgtagtcacgctccatgaaatgcttatcatattggtttgggattggagctgcatcttgagcaaattctagtaagtattctagccattctctgtgtttatctagactcaggaaggagaagtgtaggcagctgctcctgtaggaagaagagaattgaggactcagggcatttcctgacacatttaattgctgagaaaataaataccccagtgagacttaaaataataggaaaacgctttgtgttggatggggcctgaacacagagaaaaagaaggccttctgtgggagccagtgcctctccagcagctgcgacacttcaatcacccattcccccatcgcttgctcggtggaacttaacattgctcttctggaaaatacacaagggctagagaacagtaactgaaagggctcagggaataacactgagttcaagcttttctgttcagaaccaacaaaacacgaagtgaagtgggaaaagaggtccctgtcgcaatggctcagatgtctggattggaaaggtcacagccagcatcttgctgtatggatgaagccccacaagaccaaagagaaaagcgtgcaatttcagtgtgcctgcctctctctctctcacacacatacatacatgcacacacacacatgcttacccagtaaatgtgtagacctccaaagcaaatttctgtagtaggctggtcttggtagaattcgacaggatgaggaccacattcatgtggcctggcctcagacgtaccaagttactggtgtatgttacatctgtgagttcagttacctccacaaagccttttttaggaatcttgctgtggagaaatattgaggagttaagatgctgtcaggatagggggaaagccgttactttgaaaagaaacagctgaaagaaaatgctatgttctaaccagactaggtatgttattcactattcttgagtctaacacattggtaggatggggatggcctgacttggtaatccctgacctacaaacagcctttctgtgctgcttttctttttctttttgagataggttcttgctctgttttccaggcttgagtgcagcgacatgatcatggctcactgcagcctcgacctcctgggctcaagtgatcctcctacctcagcctcccaagtagctgggactacaggtgcctgccaccacatccagctaattttataagttttttgtagagacagggtcttgccatgttgcctaagctagtctcaaaccctgggctcaagcaatcctcccacctaggcctcctaaaagtcttgggattacaggcgtgagccactgtgccctgcttgatgctgcttttcaggtgcagaagttgctctaggacagaatgaagaagacaactatcattcagtctatgttctttgtctcggagaccctggcctcttgctgctgggtgtgtgtgcgcacaagactggttacgttcattgacatttacagggataaaccacgtcctgcttctggctcacctaacacttgcctgataggcttctttccttctgccttcattatgaaatctaaggcatctaaacacctacagggtcttagtaaacacaaatcacagtgacttttccctgtagccacagtttacatgggaggaggtgcatgagagttcttctctacactctatgttccaatgctgcgttatcagatgacaggatctggggggcaggtgccggggaggtgagtctggtgttttgttagagaaacctgctgttttctttggtgaagcttggctyagttttcccagtcttctcttgggcttcctctttttctggagggcttgactctcgctcatcattagagtcgctaaagtaagaaaaaaggagttttacaaaaaaagtgtcaacaccaaccatggtggtgcaccgagaagccacaggacatttacctgaaagcctgaacgatgacagtgccgaagaggatgaagagggcagagaagatcagggacagcaggggcatcatttccckcctaaaaccaaattaacaaactattagctcaagttaaaatttcttctctccagctaaaaaaagataaaataaaaatcccaaaccaaaaactcttcacaccaataaacgcttactaatttcaggcaaacagagcttttcttggcgggtggaggtggtggaggggaaggtagagattgctcagtgttctaattcacagacagcttattctaaaagtttgattttgtatctcagtataataggctatgctcaataagttctgcatgaggaaacaataaaagggataataaaggacttaaggtgtaaacatggaagaattttctgacattgtggaattatttcctcaactttactgatttttttctggccagaaaaattcagatgtagcccagaggggtggagtagggagataaaattgatctttcaagatttcatctaggactggtgttctgaaattttatgtacctaccaacacccatcaaaggctgtcatttgtcaggtgctgtgttgggtgccaggaatcacaaacacgaatgagatgtggttctgtccttcaggggctcatggtctcatcagtaggtgggagtgggtatccctcttgaggttaattcactcattccttttacatctatacactggactccacgtgtgtca

SEQ ID NO: 95273 - DNA, 294290 bp, Homo sapiens
  misc_feature (1)...(294290): n = A,T,C or G
attaactcttcatgttatagaggtgcaggtgtctaacaagaaaaaaaaatttcttctgaaatgctttgcaaccacgaactatagactaataaaccaccccattctctattataggcatccagcagcaagaatgagtgaaagaaataagtatttttaaaaagtttaaacttttattcaatattattattattattattattattattattattattattattttgagatggagtcttgctctgttgcccaggctggaattcaatgatgctatctcaactcactgcaacctccacctcataggttcaagggattctgccacctcagcctcccgagtagctgggattacaggcatccaccatcatgcctggctaatttttgaattttcatagaaacgaggtttcaccatgttggccaggccagggcaggttttggactcctgacctcaggtgatctgcctgccttggcctcccaaagtgctgggattacaggtgtgagctaccgtgcccggccttaaacttttagttttaaagaatgaaaagtcaacaccggggcctgttgtggggcagggggagcagggagggatagcattggagatatacctaatgtaaatgacgagttaatgggtgcagcacaccaacatggcacatgtatacatatgtaacaaacctgcacgttgtgcacatgtaccctagaacttaaggcataataaagatatatatatatgcaaaaaaaaaaaagaatgaagagtcagtgagggagacattaaggcctatatttgggagatgtccttttaaatcatcttgtaattatgtgagaaaataatgtagagaaatgagagcaagattaaatgatctaatcaacccacagttacaatcccaggatatacttagtgtcccaggctattgtgtgaacaagttgttccaaagtggcctcattcaaggaaatctaaaagaatggccaaccattgcagaaaatgtatttgaatgctcaaagtagatagtctaagccataacagagggctgtcacatctgtgtgctgctcaggatgatggataatataagtgcagcctgattagtgtcttgggataaacagagagctaaagcaggagagtcagaggtttgtaaataaatctattactgacatcttggatgaatctgacctttgcagtgccagaatagatgacaatacaatacattggtaccaagggctagctccaagaaaactttgttcttcgttttgaataaaattttaatgatgaaccaatagcagaatctataggtacatatagcctttctgcttttcatattttatgttttactacaatagcataattcacatatgcacagaaaagtatatctgccttgttttaggtacctaatttttttccttaggatacatattgctgcctttgtgtgtgtgtatcaaatgctttaatttaacaaaactacaactgtgttaagttataaaatgtaattgttgttatccatcttgaagtctgtgtcttgggataagaacactgttttcaatttaagtattaaaataagttcggtcattaagcagggatgttgtacaatacagctgataacagcatagtgctaggggtcaccatacctgagttctaatcccagcttcaccacttaccaactggatggctataggcaaattactagcttcgctgagcttcagttttctcctctactacaaaaaaaaaaaaaaaataatacttcacacagctcttgtgagacttcaatgtgataatatatatttttagaattttagtgcttttcctcccctattcttattgccccttgcaatttcattgttctcttcactgtatgcttatgagaaagggtagatcattcttcttgttatggttgggaaaatactaaaaaataataatggtgaatttatatacctgaacatggtattttcatctgtgaattttgaattcattccttttcatcctgagctatattccactctgaatatagcttaattcacatcaattatttactttgtaaaaagaaattatttttcttcttttctcctcttataaaagatagctctcagacaaaaggaaacagactttgggattgataaagtggctgcataaaggatgggaaagggcaagcacagaacaaatcttagtgaggtgtttataactgttacctattgctcccttacatgttcagaagttccttgaatccattttgctgctttatatctctgccactggctcacacaattccctggcctttctcttcatgtagagcagttagaacctacttatccagccagactcagttcgtttcctgttgcccaccagtttcttgcctgctgcccatcccctcctctgctcccaccctccatagaagaaatcatttcctccattcttctccattctatcttaagcatctttctaacacagttcctctaagcatgattttacttgctgtctttgttcactagatgctagggcccagagtccactgccacaagcagtgtctcttgttctcctggagacagtcttctatgagtgttcctcaacacagagctttactgtggggccaggcatctcatgcccagccctgatctaatcatctaattctagtgagcaacctacaactgagtgtgtgtgtgtctgtgtgtgtgtgtgtgtgtgtgtgtgttattagaggtagtataatatagtggtttggtatcaaattatcagatgtacatcttaattctatcaatttactttttaactgattacttactacttgattttgggcaagttacttctccatgcctcaactatattatctctaaaatgagatcattatagtatccttttgtagaaatattataatgtttaaataggacatccaaatgcttagaatagaacctggcacacaggaagcacagtcaatgttagccataattatacttaaataatagtaatctaaataacttaagtaggagatccttataatcaatggatctgatttctcaatttaaagtgtcttaaggaaagatggctgacatgaataattttcatccatttatagagaagtaaatatggatgctcataatgattaaatctgttttgaaggcaggctctgaaaagcttctttcttgcataaattttctctaagactcacctcataagaaaaagaaattatgcatcttatgtggaggaaaattccatatgatattttttatttatcttgtaaaatgtaaatgattcttttatgacatagctctgtaggccactactaatttgtatagttctctcatagtaatttccatgcttctttgaattacagctaactttttaaaaccctgatgcagtgttttaaccaagctttttttccaaaacaccaagtcaccttcactagcattagatcacagttaaggaaaaacagcacctatcgactcagaatatttctgtatgagttaagtggttgactttttcactaattggctaattcattcattgctgtttgacttcacgaacagcaatgagtgaattagccaattagtgaaaaagtgaattgaagccgttacaagtatgatattagattgactcacataggaatatgacctttttcgttactttatcatttctaagtaaattaataatgaatgtctagtcaccaaaattacagcccactcagggttatttttaccatgctgaactaactattctaatgatatatccagccaaattggaaattggaaatttttgctgctaacggaattttcatgcatagtttaacaattcagctacctgcagccctgaacaaaatacattgccagcaggatgctttttggcaaagtcatagtcaattataataatgggaattttaaatgccccaccaataaatgttggaattatctgtggaaaaggaaggggttcagaacattactgcagcattgtttcattaccataagtaagtatattttattcttggagatctatgtaagtttgataattagttattttaggaaacaagaaaataagaaaaatagacctattgtaagtgggatacaattatttttccctaacctccagccctgcagcatttctagtaacagatgttagatgagaagagttattcttctaagctttacagaatgctaaataaattatctcaaaggttgactcagtaagaatttcaaagagttaattgtcagtattgaactttgtcaactatcattttcatttattcatttttgagtatctattttgcatgaggcattgctctagggagttgggacatatcaataaagtcatcaaagttcttcaacattggagctcaaattctgttttgcgggggggagtagggaaatagatactaaacaatagattttataagtaattattttggtttgttagaaagtgatacgggaaaagcaaactggaggacagtgaatcaggaataggagaagaggttgcagcttagagtggtttgggatgaaatgatagtgccacagaaatggagtgtgccacacgcatgggggagtagggggtggagcacgttgctagagaggggctagacatggagatatgtctctattttcagcagagaaggcctgtcaagatattaaaagtacatctcattgtccccttctcccacttgttggagtgcttcctggccttgtctctcagagctgaagatgacataaatcataaaagaaataaatggtaccgcctgggctctctgatcttataaggtcccacctaatttaagctctggtggatagcctatttcccattagttgtctcaattcacagaggatggagaaagaaagcactgaatgagatgtgcagctcaactcaatgggcacttgttagccccaattatttggctaggacaactttattcaagttaatggaatacaaaactcagcagttcttatggagacttcaatgtgctgtagaacaaaccacagataaatgaactgtctgaaagaataatatgaggcacggctaaacaagtgttgtggaagagaaagatcactgtaatctagagttagttagagttagggctttctggaaaagtgagaccaacattacaccttcgaaaactagtgtggtggtggtgcaagtggaggaaaatgggaaagaggcaacagtgtccataaagacacagaggcagaaagggcagaggccctgggatagttaaaagagaagtctagctgagggacttcttgacttgactagcagcaattagccatgactaataaggctttccacactccaaagacttagatggagggataaaaaaccatctaatggcagactgtggtagcctccctagagacacagagctgggccggatgagtccaggcactgacgtgatccattatctttcaccttaaagagtaaaagggaaactaaagttaattacctccacgaaacaaaaaggtgccttcttgtgcttcaattacatggatatattctactagtctaaaagtatcttctcacttctttctgtcactgtgaggacttgagtcagaagaaagtttaaatacagtcattgagctggaaagagtggaaagagaagcaaagagggggaagctgtaggaaggacgaagtcacccccaagatacatggttactgcttacaccaagcaagctgccttgggaacgcttcccccgagcagccagaatgctcagcagtggaagacacctctattcctgtaggcgagtcctgggaagctggtcaatctgcaaatgccaattcccagcagtgagctcggtccacgtgtaaatcaagatttggggaaagagtagggtgggtggcatggttgacaatgtcatcagctccctcctctgactcctgtggtcgtgcccccatctactctcactcagctacaccccaccttcggatttgtgatggacgctgggtccctagtaaccacagcaagtgtctcccccgcacttcccccttccccacccccacccccacccccaaccaccaccccagcgatggagcctactctgctccaagccgccgctaagacccggagaagcggaatttcactttgaaattcccttgcctcgtgagggccggcgctgggcatgctcagtagccgcggcgctgctgctgggctgctgggctggcgcggagtccaccctgccgtctccgccttggcttctgggcgtccagaaggccaggcatttgccgcctctgagcgcttctgttccccttacccgcaacctcctactgctcttcctctctccctctcttagggaggttgaagctggtgctggtttctgtcggcgccacagactgactgctctgcaaaccccagccgaggacctgaatcccggagactagaagacccttggcggtggctctttctaatagcactttacctgaagtggggtcgtggtggagtttctcctccacctctcaatgcaaacactatgcggagagcagtctgcttccctgcgctgtgcctgctccttaatcttcacgctgcaggtaaggggttrccaggcttagagccggagctgtgcatgagatgggaaactgcacatgcttaaggactctaggaaaagcttgccttgcgaagaaagcctttctaaaaaggtaaaacaggacagtacctgacagggaaggggtgagggagtcgtgcacctgttggaaaactgaggccgaaaacttaacctaaaattagctcttgatttttctttactttatacgaaaatagtgaacattttcaatatgaatacaggtttgctccccccttcgcctcccctccgtctagattccctgctcttgtttctaggctatgcacttaactgtcaatttttcaggagagggataagacatcctgctagatgtaaccttttctactgcagcggctactacattmataaggtctcttggtctagcgagcgctcataggaaggcattggctgtaacctgatggaccacatctccgcccaaaagatcgaaatacatggttcacattagtgatgctgcaccaggctcctttggcccctgctcttgtcactcgaattttctaagccaataagaggaagaaaaggtttcaaatagaatcctcttgtctctttcagcaccgtggctagcgtccgctggcatattaaaaaaaaaaaaaaaaaaaaamaattacagttccaaagctgacaaccctgggttaggcactgtccctcggacagatttgataaggtgtaaccaagagtaacagtgagactgctcccaaatataaatagatttgaggcaccagaatcaatatcaagtctcgtgaggaagcaaaccttgggaagtacctgagagatattatatgtggtgtccctgctttttgcatacatagcacctctatttaatgcagacagacttgctaggctgaattccttatcattgtcacacacacatgaaccaaaataaaatatggcagggagattttagaaaccctactgtgacagcagttgtccatgcagtagtcctgtaacaaccagagacgaggcattttccctgagtgtgcttctcatccaatcacacatatccattcattccttcaagcaacatttgctgagtgtatactatgttctaggggtaatgagtaaaaataattgttctgaaattacaatccttgcagtatcttttttaaaagagtgggtgaattttattctctgtgtacaatagtaggagtgaaatatggtactttcttattccagctaacgctattatttaartgtatcatgaatcttttgagcaaataatgcataggattattaaagctattattaaatacacatgttaattgttataattatgatgttatattgtggagttttcaatagttctttggcacattttgagaagtagaaaatagctatgacttgattattaaattatttgcaaacagctgtagtgaattatttcgttaccacatacaattcttcaatgctgaaatgtgggatgaaaacatacacattgggttgagttttatttatagtattgcttaataatagactgacacaaacattcattacagaaaaatctcaattcttactaaggtagcaatgatttagctggtctgccaacaatatcagtgtagtcattttttcaaaactaacatataaaaaagtttaaagatcacatttgatacatcttgagtaattatatcttaaaagttataaataaactgaagcatgtgaaaaacatgtcttgatttactgtagatgaatattcgggatgagaaaaatgaggacttttgctcatcagatgagaaacctagaagcctgtagccctagattttacctggagttctgccaaagggtatattaccaaagccaatccaatccatctctacttcaactttttaatttgcaaaacaaagataaaaagtaagattaatcaaccaattttaatttaataagaaaatgcatttaaggacatttttatatttcaattgcaagatactattcattgtattcatatttaatatagtaaaatacattggtgttttatcacagcagattgtaagtttaatattatagttctcttgccaatttcattttaaatgcattttaattttaaacagcaatttgtgggtcacaagctgtcatcagattaaaatttatcacagttatctaataacattgttagggcttttcatcagaactaaaacaaacacagctccttggtctaagcttctatacatttggagattaagaaaataagtggatgggatgacaaagatcaagaaatcaagatattaatctctacttgttgaaggtgtgagtttgttacttttatggaagacttttctctcagaacagaggctgacttcataaagaagggaaatgaattctatacattcaggcctctttaactgtaaagctaattgatccattttggttacgcccagggtatcagcaactgctttatgctggtggaactgatgacaccttataatgctttagagatgggaggaatgtgctaacgggatgtaagtgttctttttagctatattaggaactgttgccttcaatataaccatgcctgtaatgataagtagcaaactgcttgcaacttgagtgccatctcccattattttgcttatggttgcctaagacaccatcggggggaaaaagaagattatgactcgcattctggctagggagaagtactgtggtctataatagctgtgggagaaaaatgaggagtgggtaccatgctgtgtaagtggcatctctgggtaaattaacactaaaggattactaagcatggttcttgttagagaagctggacactactctacccatggcagccgatttttatagatcacctaacaaggaagttgtgcttattgtccatccaactgcttattttacaggtgagaaaatgaagatctagagtattaaagtggtagttaatagcatagtcgggataaaagcccaggtttccagacccgtggttgcatactatataaaattatacactggttctacaataggtgaggccaccattgattaagttagtggtgcaaaatactttttacctaactgtccttattctttactctttcgtgaaccagtttaatatataaactccagttgaaaataccacttcaggaatattcaaggaggcaattaaaagccaccacaataatacgaatggtaaaaaaatattatgtggaagatccacagagcttattttcttcagcatttctcctcttcctttgtccaaagaagcatattccatttgaggagatattatttatagkgttgtattttagttgcaaaagagtacatttttgagatatattaaaaattctcatgtgaaagctttctttttcctagggaatgttytgctaacaaaatacagaaactgatttcaatccattkctttctctttgagttctggaaaaggttctttcaaatttctgtgttgttcttgctatcagcctttttgaatggcacaaagactgccttcaatgtatctcctgaaactatctcttcactctcagagaagtgcatagtcaatttccttagactctaagaagaaaggtattctatgatagtaccaagaagatctgggaggtgatttgcagaagtaccaccctcaaaagaaaggatagactaacaggtaaatgatatattttaagattttaagatgttccttagaactccagaatttgtttttcctattgaaaatctctcagagaagtgcatagtcaatttctctagtctctgagaagaaaggtattctatgatggtgccaagaagatctgggagatgatttgcagaagtaccaccctcaaaagaaacgatagactaacaggtaaatgatatattttaagattttaagatgttccttagaactccagaatttgtttttcctattgaaaatcactcaatatagaccttacaatggtctagagtctctctccacattatttctatgatattatctctcactactttcttctttttttacctctctccagccatatttatccttctgtttctagaagatgccaggcactcaccctttcatactgttttgcttttttctttctccaggtgtctccacagcttaatcccacaataattttagaactttaattaaatattaccttgttaatgaggttattctatttcatatttcattttcccttccccccatcacccagataaaaattctagcaccctttccctgcctaacttttctttccccagaggtcttcaccacccaacatacaatatattttactttttttattgtagtttcccctctctgtattaaaatgtaagcccatttagggcacatatttttgcctgttttgtttattattgcatgtattagaggtcttgggctacctagtacctgggggcagttcctgacataaaatctttctaaagattaaataaataagttaaataaataatgtaatacagtgatatttctggtctcttctttttgcatttaatatcttcttaacacccacaaaaaacacacatagtccacttagccacttctggaatggacttaaacagctcatttgtccaaaactcatgttgcctcacatgcccccaaaacacactatctctaacagattttgctgtcattgtgaactgaagggcaataaaggatgggtttgtgttagaccagaactactaatcaactcagtgaaaaaagtctttcaaactgattgccagatattgtgcagcccaaattctttgctgattggctacattttcacttctcagtgaaatgccttgtacatgtaggaatggctacagggatcagctgatttacaaacagagagtctaatacactagaaaaaactgatttgcttctttggtacttaagagacacaggaatatgtatattggagatgacatatttctagcacctccaatagaatagcacctcacatattccattgaaaatcacatcctacctaacaccttgtaaaaattctgggatgcattatgcacattcagccttttcttctttatttctcacctacttctctatcagcttcmgtcctcatcctatcatcctatggttgaacataattaaagaggttattgtaatgtatgttcttgttatcaatgcatttctatagtacttatatattttgacccctttctgaattttaaaatttttcctcacttgacttccacagacagtcattacttcctagcttccctcttatytctccagccatttctcaatttgtacttttaggtcttctgctgtgtattatttaatggttagtgctctctacagcttgtcattgattttttgttatttttctctgtatacaatctccctggataattatactcagacttgcacgtcaaagattccaaaatccacatttccatctcagttatctcccctgaactctggttctatatttaaaattacctagaagtcattgtatattccatagtaatctttttgtttttgttgttgttgttgttgctgttgttgttgttagagacagggcctcactctgttgcccaagcttgagtgcagtggtgcaatcatggctccctgcagcctcgacctcctgggctcaagcagtcctcctgcctcaacctcagagagtgctgggattacaggtgtgagccacagtacctggccccacaataatcttatatacaactatttttactcaacacttctcaacacaattactctgataaatattccctaacattgtgaataacaccaggattcttcacaatgacccaggtctgaaacaaataattgatcctagatcatccctttgctactttcatcttaaaggtttcaaactcttctcataagatgttctccactctccatgatcatgtcactgccttragacagatccttatttctcacataatatcttgtgatgacctcctatcaaatttattctttataataatgtcggaggtgaaactcttaaaagcatacctgatcatattctttctccaaaaaattctttaatacagctatctccttttcttttagaataaactccaaactcattaggaaggcagtcttttgcgatgaggtcttctcatcttgccctcctttgcacactaatatcacactaagacaaaatttcctttggtttgccatgtcttgaatcatttcacatactgttctatttctcttaaataccaatactctgctcctttttttagatgactctttctccaacttcaaatgttgatcaggcatagcccactttgagaatcttcttttttttggatgactcacctcattcaagtagctctccwacatttcccttttcaatcctgtatattcccctgtcaatgtacttaacctgtatactgaagttttttgagaacaataacacaattgcagctttatttctatatacttattccctagaactatgcttgttacctaatatggcatcagtaagtgttcaatgaaygaatacatatattaaatatatttgttaaaatgaattgtgataaattaatttacattgaccaagagattatatctcatcttcatgaccataaagaaggtaattgactttactactgccaccttagtgcaatttacacttattgacaacaaggaaatggagatgggacagaaaattttctatgtaaatacactccataagataagtttgtgtcccatgggcatgatgctatttgtagtgtacttgtgtgctgaactctttctagatggatagacattcttgcatgattttccagtactacttaagaatagaatgagattttttttttactttaaagagctcaaagagttagataaacaacatagcatgatagttgtccactacagaatggacccggaactcctaaccctgattactgattggttattatctacctatagcaaatacaagacatttacacattcaaaatcaggtgggagtgtgagacagtggcttcaataaatcaagaccaaaaattattcaaccctccttttctctctgaattaaaaaccaaatcatcacacaaaatgtctgaatatttgagtggttgtatacattttttctctcattttgtgtgtatacagtctttatagaaccataaagtttttggatcccacatattttttctcatagaagacattcttacacctgaagaatggagactattttgtgaattatttaaaaatcgctttatgtgagatgatcagatcacaaatcaaaagcccattcattgccattagtattagagataacacggatgttatattttatggcaagtttattgttaaatcttaaaagttgttctgtgagtcaaattcaaaagctagtgaaagccattttttcctttaaaaggggatttgaaagattctacttggcccatgagtgcatttttcatcttcaaggcatttacaaatgctgacacacttagagtagcattgatgtttcccaacataaaggatgttagtagtttcgaaaaataaagatgtaatgctaaaatattattttaagatcaaatttcctaatgcttatgtaccatataatgtaactataagtgcytactatagtaatgatatttgccacaaaaggacaattagcaaatttatattataaacattagcactttccacttaaatcatttttattcataatgactgcataaactttcctcataatcaaatctcatttgattttaatatattaagatgttgatgtccattaaaattgcagccacatggaccaacaacaaagcaaaactattatttatattatgcagcagtctagaacttagcaaatgccaagttcattggggacatgaattattttttcctatttctattttattttttatttcctttttttcagatctaaagcaatgtccattttctgacttaaatgagaagactggcctcaggcagtcctaaactactgattctttggaaaggagcatttaatgagcacagagtaaaagcatctcacagtgattcactggactgtacagcaatatgtacagagcaagactctacagctatttcactgtactaatgatccaattcctgaggcatactggagagaaaaggaagcaataaatgcacagaatcagttcaccactgggtgactttcacttatctgggaaaaatgatcaaacataatatcatagtgagttagttaggttgaaagaccatcaatccattaatgtaaatgtatggctttcaatcataagcaatttagtttctttgtcttcttgattcaaggtggtatttttaaaattctccctgaagaaaataaagtagcttaaacagaagaaaggagaaaatttaaacaaggggaaatgtcatgtttctagataactttttagcagaattccatagtagttgagagttaagtgggataatatatccaaacttgcagtcttagagagtgtcatagaagtgttaggcattacgtgattagactaaggagatgataaatggttaattgtaccttggaggaatttcttattctttttatgtttatgccaatactgggtaagcatacacacctagatacattctggattytgagtggtttttttttttttttttttcagttgagccttttcttgatagttttcatctgtatgctataggcaggagcctgaccatatgtgcaggtttgtagtggactatgaagctcgaaaatatctacctccctgcagatatctctcccaatgccttttctaaaagtttcatctaaacatgaattctagcatcatgtcttcagcaagttctacttaaatgaatgtgaaataaaaatttctcttggatatgcctgattgtgactgaaaatgtgtaacatttacataaacatcataaatctgaagtgcctagttcctactgcactgccttgcttagcaggcagtctagacttgtcctaggatacatcttcctaattaatccctctagggacccacaaagggtgaaaagctcaagcatggacgagggatgctgctcataggtctataggcttcccatctgttgtctactcctctggccatccttcttctctactgaccaactgatactatcctatttaccatttgtagcccatggaatttctagaccattgggctgtaggtccatgtggaaggctgcctgtggttctgcagacaccagccaagacaggggtgtttgaatgtaaagggatagaaggaggggcatgggtatgggaagaacataatggaaaaggtcacatgcagccacaacctattcattgaactactcaccactcccctaaaacccaggctactcagctgaccctgcttttccaggactcttctcgctgctgattttacctcaggtgacctattatttatagcttcagtttgactcccttggagacccatagttcacaagaaaactcagaattcagttatagaaactttttcatgatgcttcacttctctatgcaaatccagagacacatctggcagctctttcagtgcctctgaaaatttcatgacatttaagaagctcactagggcaattcacatgagtcctcacaagcctggtccccttgggcatttgrgcatgtctcttggcattgctgggaacctctgtacctctagagcatcaggatttcccatcaggcattcattggttacttttgattgttttatttcctcaaactgggaatgcctgatatttagagggcttaaattataaattttatcatgttatttgtaactcctaaatctgagcattaactgaagctacagaaacataataaaaagtcttcctctcaagacaagcattgaatttcatatggaaaagacaaatagatttccttttaagacaggaaggagataacaaatgagtatttcctaaatccctttgatgtgctaaactctacccaaggtgcttttgtaagataattgccttaccttttaggattgaaaaatgttttgaaatggcatgcttatacttcagaaacaacaaaaatatgccttaactcatgtagtacaataaaaacaaacaaacaaaaaaacatttgggctctaggatttgactacctgagttcgaatcccatcttctcccatttaaaaagctaatgtataagaccctgcagcatggaacctggaacactgaatatattctatattcaatactagtagttgtaggagttgtattaacatgtgaaaactttcattggtcctgtatttcctatagctgcaatataagaccaatgaaaagaaaatataaaaagaaaaatggtgcacattgactattgacctattaaaaaaaatcactctaaaaccttcatttgtgaagagtacatgctatgaagatcaaataagcatgtcccaatttttaaaatactagtaaaaccttcgtcttataaatttttaaatgctcataattagcaagttcatgttgaagaaactaaatcctgctttcaaaacaagtatataagagaaaaaaaacctctaaccaccagaggcactgccaccacgggcaacctttcttctgacaaagtatctgtcagtctcagggattgggtaggacatgcggtatcatcacttctgctaccctactctacagactatatgaatccacaacatccaacaaaggccaaaacattccacttctaatgctgactttcagtcttagagaaatatgtactagacagggaaagtttgatatcctacaatgagtttatgtgaagggggccctgattaacagaggctttgcttatactaatgttttgttttgttcctttgagtggagactcaaagaagtttttctaccctgatggagaaattcagttcagattaagttacaggtgtaccttttttttgtaaagtttgatgaaatgctttgttccggaaaggagtgccagcatgaaatgtgtccctgactataggtacattctgaagcagataaattttagaaaaaagctgaggatctggacagtgattcttcatgcctgtgcacaatttgcatactccaatttgaaaatcctgtccacatatctttgatgtgtgtgtggtgggggagggtatgcactttatgaaatcaaagagagttctcacacatacaattagggaatcaggtgtcctgtctccccttgggttaagttttgctgagtctgcagcaaattcccagtgggtgcaggatcaattcctgccagtccaggcctgtcttgtgcctctggtacccaatacctcaccctgcagcatcagctgtcactgctggcagcgcccctcaggtcctccctccaccagcccttcatgtcttgaagtttacacttgggaactatgtttctaatctgagcttcaatctccaattttctctttcttctccaccctcagctaaactgggtagttgctgcttcctattccaggagagatctcttctcagaaaggatgtgccacactgatctacttcagataagaatagctgttaattatatggcccttccttaattttgatttttcaaagaatcattagaaagcagagccttagcccagtgccattaatttcaaatggtggatgaaagagcaagaacgagatggaatagcagtgttgaaagggtctaccaagtgcccctcaaatcccaaaacacaggcaagggagaccaggacagggatctcttcaagtggccagctacagacctctttccccattgatacggtttggctgtgtcctcacccaagtctcatcttgaattgtagttctcataatccccacctgttgtgggagggaccaggtggagataattgaatcatggggcggcttcctctatcctgttcttgtggtagtaagttagttctcacgagatctgatggttttataagggacttccccccttctctgggcactcattctctcacctgctgccatgtgaagagggatgtgtttgcttccccttctgccgattgtaagttttctgaggccttcccagccacgcggaactgtgagtcaattacacctctttttctttataagttacccagtctctggtatgtctttattaacagcgtgagaatggactaatacacccactttcctcttcccctaatatataagcattaatgtctctgtagtatcattactatggtgagattttaatatttatgtgttctaatgttcgttttgctatgttttaatataattcctaatctgctatgagaattattcttaaaacagacacttttttttcctttgtcttaaaattggagcccagtttttaagttgtctggagaactctgctatgaaaacaatggagatagtttctaatctttatttgaaaacaattatattttagctgtttgtataacaatgaacgaygtatagaattagtttctaaatgtactacttcattattcagtgagtgcaaacagaactgaactcctgtgatttctgcagtcttagctttctagccatatgagcatttttctgccttttcccagagggtgtagtttgatagtcctctcttaatggctgtataacatttaacatatagtagcattcactcctgtcaacctctcctcccagtatcctttgactcaatacttcagaaactgggggacatctgattgctatacctcagctggcacacatttcactttttccagcagagtctgaggcccaaggtcttaatgctcattctttcttcatgacttatgtctagtcacattgtcccaaggtaccgttttaattgtrttatgttccactctgtaatagatatttatcaaatgaaaaataactctattaaagctgggcaaaaatcaggaaacatgaacccctttcattgcaattttaccaccagcaaatagcagacaatggatttttcctgaaacrgttgtcaattctgtaactcccaaatagaggtttacactgttcagctcaactttcaatggataaacagggagaagtaagggatatccagagtatttatgctgggctgacagtggaaggaggagccacttttcctaatagaatattttgggaaatgtgaaaaaacatgtgaggaaactttacaaggtgattaaaatcatcccttactctaatgggattcaggttcttctcttaaatagcagtgatcagagctagcactataaaaacagaacaattactttgctattggtttctttatttttattatagatgtattggacacatcactgttcaaatatgtggagagtttaaataatattaaagaatgtcacaacacttcctggtagaattatattttcacatcttagtagccagtgtgtagactggatcttagaaaaaccagtcctggaaggacgtgttaaaattttattttagttttctttaaggctagtcaattgaaggagtaggagtggagaaggaacaaagaaatccgcaactggttgtgatcaattagttgtaaacaccactgcactgggaccagccttggaagtgttcttttaataagtttatccacgtgttttttgggtccatgtttataattttggcaaatttaattattgtcatctcgtagaaactgattttttttwaaaaaaactttttgtaacaaaatggctagtttaaggataaatatttttgtcaaattggttatttggtgtcaggatacaaaacaaaacaatgtgtgtacatacaaatatatacatacatatgcatatattgttggaacataactaaggcacagaaactgaattctgtamaactggctttgtatatagcatatgttgtattttgggaggttatcctaactaacattggttgtcatattttgggaaggctgtaatgtttatcagtggggtttagtgttattactgttgacacttttaactggagattagtattctggttatctcttgttactattaccaatagaatgatagaacaactaaataatagatttaatattagcctccttacatcccagagtagaatttctggaaatccctgcttctgtaagttcccaaagtgtcttttatactatttatggaaaaacttatttctttagaaaaaaaatcaggaccatgcaaaatctgtctaactgaattgtggcttcttttttactgaaatatatttctaatctagttgtagatatgcaaaaaccacctacattttctgatgagaagactgaggctcattggggtgagctaacacagacgagaagagagaagttgggaggtcatttaaattagaatctaggtccttcctttatttcttaattctttcctcttaataaaaagcatgtttctttcctttctcaatactaaataggcacctttcccaaaagaacttttattgctacaattatgtatttttaattttcctgagaggcattaacaaatcaaataaatgggagcctaatcatttctcatgcataaattctcaagggaagcccttgatgctatccatttatctctcctttctagagaagaaggtgttaacattcctaacaaaacaatgattgtcttttcaaaaaatgattacacagtaaaagcctttttttgattgttcactttttcaagtctctttggagaccactgttttattctttctttcacaagttattgacattgacttaagtacttgcaatgcgaggatttattctgagagagtgtatacaaggccattctaccttatgcattcaggaataaccaacactgaatttgaaataatgaatcataatgtactctaactaaacattgtaatttcattcatttctctttcctttgttaaagatctcttcagaggctaccaaggtcatacccagaatgaaatttcaatttcaactgtgcaattttatgaccatcaaatctcactggttattttcatgtaaatgttgtttttatgataaaagttcttttattttaaatgtagattagtatctttggcaagctacttactaaacattctgtaagagacactctatccctcacaggtagggaaaactgtcactgaactctcaatgaagacaagaaatcctaccatgtatttcatatcaactttctttacaataactctttcaattcctctccattctcctgaaacctttcatctttcctccctagtcctcactctcttatgagatgacttcatctccttctacacagaaaatatagacaccatcaaaagataattttctcaacttccaacaccaaacccattaacatccctaatctccctcccctctacctataatgaaataaataccttcctcaaatccaaggctcattcctctgcctgtactctgggtcctctctcctcctatcttctgggggagttcagtctactaattattccagctgcattctcttatgtctgatcactccttttagctggctccttctccttgaggattaaatgtgccaaaatctctactttcttaaaaagaaaccaaaaacacatccctcaaccctatctttccttcctggtaacacatagtcactctcttattayacccaaacttgatttttccacttattttgtttctactttatctcctactcagtcctcatttcaattaaatttagctttctgtcccttcccaacacactgaaactactttttataaattcatcaatgatatttcttatgaaaaagacttaaatttagttatgagaaaagatgtttgatatagttacgcttgaaaaaagtagcttacaaaacatagtataacctattgacttttttggtgtatagttctatgaattttcacacatgtatagattcatgtcatcacaaccacaatctggatacagaatagttcgctcaccacaaaaaaacttcctactatctttttgtctccaactcctacacccaaataaccactgatctgtatttcataactatatwtttttgtcttttgagaatgtcatgtaatggaaaaatacagtgactttttgagactggcttctttcgctcaacttaatgccttttatattcaagttgtgtggatcaatagctcacttttttttactgatgagtggtattacattgtttagatgtatcatagtttatctatccacccattgaaggacatttgagttgtttccatttgggggcaattatgaatagacttgctaataaaatttgtttacagacatttgtgggaatatacatttttatttctctggggtaagaatgtagaagtgaaattgctatatcatatgctaagtatgtgtttaactttacaagaaactgtcaaaccattttccagagtgcctttgccattttgcattctcacctgcaaggtctgagacttccagttgctccagatcctctccagtattattagtacatttcattttagcaattctaatatcatatcacaatttttaatatgcattttcctattggctaatagaaatggacatactttcatttgctaatttgccattcatgtatcctctttaataaagtgtttgttcaagtctttagcccatttttaaactggtttgttttctaattgttgagttttgagagttctttatacattccagttacaaaccttttgttggatatgtgacttgtaattatttttctcccactctctagctagctttctccctttcttaacagtatctttcacagagcaaatttctttttattctgattccatccagattatctttttctctgtggattgtgattttgatgtcatgtccaaggaacctttgcctaaccttaggtaataaagattttattctatgttttcttctaaaagttctatagtttgtacattacacatttagatctgtgaaactttttagttaattttgtataaagtgtgaagtttaggtaaatgttcattttgttacatatggatgtctaatactttaaatgtaattttgaaaaggctgtcctttattgttcacctttatcaaaaatcaaatggtaatactttctctgaattcattttttaaattttatttagcagttattttatttttgatttacattatttttaattgacagatcataattttatgtatggggtaaaatgtgatgtttttatatagatatacagggtaaaatgattaaattaagacaattaacatatttatcacctcacttgtttagcatttttgtggtgagacatttcaaatttatgctcttagatattttgaaatacacaataaattattgactatagtcaccctgctgtgcaatagatctcaaaatttgtttttcctgcctatcttaaactttatatcctttaaccaacaactcctcattccttccccattccctgtcccagcctttgataaccatctttctactctctacttttctagatttcacatataagtgagatcatatgatatttgtctttctgtgcccaccttatttcactcagcataatgtcctctaggtttatccatgttgccacaaaggttaggatttccttccttttataagactgaatagtattacattatatgtacatgctaccttttctctttttcccataagttattgggggtacagggggtgttttgttacatgggtaagttctttagtgctgatttgtgagatttttggtgcacccatcacccaaccagtatgtactgcaccctatttgttagacttttatcccttgcccccctcccactcttctccctggtccccaaagtccattgtatcattcttatggctttgcatcctcatagcttagctcccacatatcagtgagaacatacgatgtttggttttccattcctgaagttacttcacttagaataaccgtctccaataccatccaggttgctgcgaatgccattaattcattccttcttatggctgagtagtattccattgtgtgtatatatagatatagctatacatatatagagacatatatatagattatatatctcagtatctcatatagacatagatctcagtctctttacccactcgttgattgacgggcatttgggttggttccacgattttgcaattgcgaattgtgctgctataaacgtgtgtttgcaagtatctttttcatataacgacttcttttcctctgagtggatacccagtagtgggattgctgaatcaaacagtagttctacttttagttctttaaggatctccacactgttttccatagtggctgtactagtttacattcccaccagcagtgttaaagtgttccctgatcactgcatccatgccaacatctactgttttctgattttttgattatggccattcttgcacgagtaaggtggtattgcattgtggttttgatttacatttccctgatcattagtgatgtcgagcattttttcatatgttggttggccatttgtataccttcttttgagaattgtctattcatgtcyttagcccactttttttatgggattgtttgttttgttcttgctgatttgtttgagtttgtatagattctgaatattagtcctttgtcagatgtgttatgggaartggtatagaggttcctttaaaaactaaaaatagaatagattgtgaagattttctcccactctgtgggttatctgtttactctgctattcttttgccatgcaaaagcttaattaaattaattaataattaaattaatgattaagtcccaactatttatctttstttttattgcatttgcttttgggttattggccatgaaatcctcgcctaagacaatatctagaagggtttttccaatattctaggatttttagagttttaggtctcagatctaagtccttaatccatcttgrgttgatttttgtataaagtgagagatgaggatccagtttcattcttctacatgtggctagccaatgatcccagcaccactttttgcaaaggatatcctttccccactttatatttttgtttgctttatcgaagatcatttggctgtaagtagttgggtttatttccaggttctgtattctgttccattggtctatgtgcctatttttatagcagtaccatgctcttttacccattcgtctattgatggacacttaggttattttcgtatcttggctattgtgaataacgcttcagtgaacgtaggagtgcaggcatctctttgacaattcattttaatctaggggagatagacacccagaattgggattgctggaacatatggtagttctatttttagttttttgaggaactgccataccatttcccataatgactgtacaggttgaggatccctaattcaaaaattcaaaaccctaaattctccaaaatagaaaactttttgcataccaacatgatgctcaaaggaaatgcttgttggagtattttgaattttgggccttttaatcagggatgctcaattagtatatattctgcaaatattctgaaatccaaaaaaatccaaaattcaaaacatatctggtcccaagcattttggaaaagaaaccacctgtaytcatttacattcccacaacaatgtgcaagagttcccctttcttcccatcctggccaacacttaactttcatcttttttgataaacccattctaacaggtatgtggtgttacttcattgtggctttaatttgcattttcctaatggttagtgatgctgagcatattttcatttacctattggaaatttgtaagtcgtcttttcagaaatatctgttcaaatcttttgcccatcttttmactgggttaatttttttggtattacattgtttgagttccttatgtatttttgatattaactccttatcagatgtgtggtttgcaaatattttctcccattctgtgggttatcacttgactttgttaattgtttcctttgctgtgcagaagctttttagtttgatgcaatcccatttgtctatttttgcttcagttgcctgtgcttttggggtcatatttaaaaaaaatcattgcccagactaatgttgtggagatttttgcctatcttttcttctagtagttttattgttttggattttatatggaaatctttaattcatttttgtatatggtgtgatgtatgaatccaatttcatgcttctgcatgaaatctctattttgcaccattgatctgtttgtctatttctttgccaacactacactacctcaataactatagctttatagtaagttttagaattgagcagtattttttaactttattattttttcaaaattgttttagctttctatttattttgcctttctatgtaaattttagaatcagcatatctacatctacaaaaaattctaatgatattttattgtaattggagatgattgacatcttcattatgtagagtcttctaattcatgaacatagtatatttgttgtttatttaggtcgtctctgatttctttgttcaacattttatagttttcagtatatatatgtatcttgcacatgttctgttagatttatacctaagtattttatttttgggtcagtttgttttttttacttctagttttcaattatacattgctaacttatacaaatgccatttagttttgtaggttgcctttatatattgtgaccttgctaaactgacctgtcagttctaggaagattttggtaaattccttgggattttttatatagacaatcatgtcatctgcaaatagaacrgttttatgtcttttgctccttttctttgtctcattgcactgactaggactcttaatacagtgttatataggaatggtatgggtgccttgtccttgtcttagaaggggaagattcagtttttcactattaagcataatgtgtactgtggggtttggtrtaggtaccttttatcaggttgagaacattctcttctatttctaggttacttaattttttcttactatgaatagacatgaattttgtcaaatagttttttccaccaattagtatgactattatttttcctctttagactctcagtagagtgggttatgtagattgtttttcaaatattgaagcagccctacattcccaggaaaatcagccccatttggtagtggcatatgtctttttctgtatttctgcattcaatttgctaatattttgttgaggacttttacatttgtgttcatgagcaatattggtctatagtgtttttttttaggattgtctctatctgcttttgttatcagggtaattttggcttcatcagatgatttcggtgaatgttcccccttctattttctgggagaaattatatagatttgatgttattttttctttaagtgtttggtagacattttcaattatgccatttggtcctgaagatttttattcagaaaaggtttaagtagaaatttcatttcttttataattttagcacaatttagattatttatttcatctttggtgagtttcaatagtttgtggttttaaggatttgatcgttttatctaaattgttgaatttatttgtagaggattgttattttcctttttatacatttttacacttgctaagtccgtaatgatatccctcctttcatttctgatattagaaatttgtgtttctctctttctctgtcagtcttgctagagttttatcagctttactaatcttttcaaataactagcttttgtttcactcgtttttctctctctgtattttcaatgtaatgatttctacttttaacagtttaatttctttacatttattttactcttttttcttgtttcttaaagtggaagcttatatttttgatttgagacctttgatttgagaccatttaatggtataattttttcttaagcactgtttcaactgcatcccacaaatcatgttatatatatgtatatacatatatatgtgtgtatatatatatttataggttaaggatttttaaaatatatatatttattgaatatgtaatatgtaatatgtaaaaataattatataaagagtatcaaggagttaaaaaaagactaaatgatgatgaaaagaaaaacataaactgtagaaaaacaatataaataagagaacaactaaaataaaatgaggtgtctttttaaaagtgcatatattgacaagataatgcattgggttcacatttatagaagtatcactttgaattagaaatttgaagacaagcaaaaacttcataatccctatactcatttactaggctggcttttttttttttaaggtttctctaattgytttaattcaggttatctacataggtttctacatatggattctctttttttattattattattatactttaagttttaggatacatgtgcacaacgtgcaggtttgttacatacatatacatgtgccatgttggtgtgctgcacccattaactmgtcatttagcattaggtatatctcctaatgttatcccttccccctccccccaccccacaacagtctctggtgtgtgatgttccccttcctgtgtccatgtgttctcattgttcaattcccacctatgagtgagaacatgtggtgtttggttttttgtccttgtgatagtttgctgagaatgatttccagcttcatccatgtccctacaaaggacatgaactcatccttttttatggctgcatagtattccatggtgtacatgtgccacattttcttaatccagtctatcattgttggacatctgggttgcttccaagtctttgctattgtgaatagtgccrcaaccaacatatgtgtgcatgtgtctttatagcagcacgatttataatcctttgggtacatacccagtaatgggacggctgggtcaaatggtatttctagttctagatccctgaggaatcgccacactgacttccacaatggttgaactaatttacagtcccaccaacagtgtaaaagtgttcctatttctccacatcctctccagcacctgttgtttcctgactttttaatgattgccattctaactggtgtgagatggtatctcattgtggttttgatttgcatttctctgatggccagtgatgatgagcattttttcatgtgttttttggctgcataaatgtcttcttttgagaagtgtctgttcatatcctttgcctcctttttgatggggttgtttgttttttttcttgtaaatgtgtttgagttcattgtagattctggatattagccctttgtcagatgagtaggttgcaaaaattttctcccattttgtaggttgcctgttcactctgatggtggtttcttttgctgtgcagaagctctttagtataattagatcccatttgtcaattttgtcttttgttgccattgcttttggtgttttagacatgaagtcctcccacattgccaagtcaatcctaagccaaacgaacaaagctggaggcatcacgctacctgacttcaaactatactacaaggctacagtaaccaaaacagcatggtactggtaccaaaacagagatatagaccaatggaacagaacacagccctcagaaataatgccgcatatctacaactatctgatctttgacaaacctgacaaaaacaagcaatggggaaaggattccctatttaataaatggtgctgggaaaactggctagccatatgtagaaagctgaaactggatcccttccttacacctgatacaaaaattaattcaagatggattaaagacttacatgttagacctaaaaccgtaaaaaccctagaagaaaacctaggcaataccattcaggatatgttatatttttaytttagttcagttcaaaatatgttctaatttgtcttgtgactttctctttggcccatggatatttagaaatgtgtttttttaatttccaaattttggaaatattcttcttttctttctgttactgattcctagtttaattccttcatggtcaaagagtataccttgtataatttcagttttcaacatgtgttattttatggcccagtatatgatctgtctagatgaataccccataagaacgtgaaaagattgtgtattctggtgttttgggttgtgtgttctataaacacctattaaatccagttggttgatggtggtgttcttttacaaccttgcctttgcttcttttctttctcctcaatctacttactattgagagggaacagttaaaatcttcaatgataattgtgaattttcccatttctcctttcatttttgtcagctttgctccatgaattttaagctcatttttgatgcatatatatttaggaatattatgtattcttatgtayattgcrtcatatgtccatcattatgtaatgtccctctttatccttgggaatttctttgtgctgaattgatattaatatagtcactccaggtttcttttgattaggttttcatgatatgttgcttttcactctttcactttaaatgtgtccatatcattatatttgaagtgagtttcttgcgcttctacacctgcatctgagtccagggtcaggtattgataggagagagagggaaaagagctatgattgttggctgctttagaattacggcttcactaatagataacttggcttctcagtcttcacttttccaaaatttttacttgagtatattcataaagctgaagtgaaggaggaaataggtagcatttgaggatagaaaatacaaaacyaattccagacattaggtcagtggtcctcaaacatcagagtttgaacataagaattctattataaatccagattcctaggctacatctatagagattatgctttggtagttctagtctggggtctaagaaactgtatcatcatgtcccrggtagctctgatacagagaacctaaggacagcactatgaaattttttttcttacctaatgattgtggtaggacacctaatattacactgctatcttagaactcattactcaggaacaaggcaggactaagttcattcacacagacaagtggataaggttggaaaattttcattgtgtttcaattgcgcttcaacttagattttgtccctttctcggtaggccaattttagcatgcatttattaactggacttttctatttagataaagtggctctgaaaagacttggtgtgattgataatatataaaaagaaagattgaagatatttgtgtaatttactcagtttgtcagttatttctcctcttttaagatatctactttccccaatcttctaagctgcttttttctttttatttactatttatagagaatccagagtagaggaattgctagtttttacaggctttgctttccatcaagccttgtgtgaccaacatatacgtcttacatcttcagcaactctgtttcacccgtatcccttcaactttcatgtggggttataaagatgggttattttcttagcccaagtgctttattccacgatataatagtatgagaatcatcttctgttaccagtagctttatctttttggaccacttgaattatattttatgtggatcctgaaatagtaatggaaactaatcatcatgtcttcagttccgagcatgctaaattgaccataacttttttaaaacaatcaagccacccakagtttgccaaagatgatgattggacaatgatgacccttaaataattgtacattttatttctccatattaaatgagttcctcggatttggaaatgaaactctcattaagaacatatgtagtataatggaattcagaacaggatatctcaatgttgttgttcttaccactgttttatcaatggaaaatggtgccaaaatgttttagatgtatatgaactttctgaccacaaggtgtgtatttaktattttactaaaaataatttactaaataatattgtagtgtcctagaagagtttctacatttctgaaaggagagtaattttcttctttccctctgaaaaactatctgatatcactacaatgaagtgattcctttggggttaagaaataaaataatatactactttcatcctggtttacttttctaataccactgatgtagaggtgattctgtgctttgggaaaggtatattgtatgcataaatgaacgtgggtctctcacctaagagaaaatagagaaatttaaatgcccagtagcatgagtactagatctgccatgataattctattgaatttgggcatgtaaatagctgaaatttgcaagaaaaacaaaataaagtacagacgcttgcatgatttgggaagtaaaagataaaaatagtaggagattggagaagaattcttgtaaaaagaggtaagtaattttctaaggacagcacttgttaccacaagcatttccagtgaaaatctggggtaccattgctagggactaygttataaaacagatctcatgtttgcttttctaactggtatttgacctagtaatattctttttgattcatatgtattatctgtttcctcctgtggccagtagcaaacaggagaagccattattcaatgcaatgaatatttatctaacagaagaaataaagatgaatgtatttgttactaaataaattcaattgctctaacaaagatacttaaaataatagcaggtaaaacaatagaatattgtttttctctctaaaaatcagagtgggaactgtgaggttggtatggtagtttcactttcatcagggatcagaatattttgtcttagtgctctaccatctttgacacatggtttctacctcatgctcctaccagactctctgcatttcagccagcacaaaagaggaaatgtagaaaggaaggccatatcacatctctgctaacatctgtttactcacattccaatagctataacttgatcaaatggcaatgcttagttgcagggaagactgagagaaatgtagtctctatctagatggccatattacttacacaagtaaggagacgatggatattgtttggactactgaaagttgctaccacaataagtacactcagatttcttacctcagagagcttaaatactctgtaagcgtgaagaaaactgttcattgtaatacaagcaataagtatgaaataagaattgtaggaaatgcttatatttaaggaaagcttaaatatgataaaaatatttataatttcagcagcagataggacatccaggaatagaagcccaagtaggtattgaaactatgggtgtagataaaggaggaaatttcttagtaaaagtggcatcagaatatctgaaaaatagaactttttcaaagtacgcccacttttatccacctaaagtctttgagaggccttcataccaccaggtgtatactatttgttgaggatcatgaagcagacaaagaaatatggagactaacctaaatccttcacaagtcttaaagcctctcaagaaagggtaatcctcttcatcagatatatctacctctcttactgaatagggtctttgatattgtttctgcttcttccctctttcagggtgcttttcaggaaacaatgatcattttttggcaattaatcagaagaagagtgggaagccggtrttcatttataagcattcacaagacattgagaagagcctggatatagccccacaaaaaatctacagacatagctaccattcctcttccgaagctcaagtaagcaaacgccaccagattgtcaattcagcatttcctagacccgcatatgacccgtctctcaatctgctggccatggatggtcaagatcttgaagtggaaaatctcccaatcccagcagcaaatgtaattgtggtggtaagtagtatgttaaactgatgctgaggctgatgttgattctttcctgtcattgatgcttgaaaaaagaaaaacactgattgtgaatagttatcaatgaatcccaacgggtatgtaccacagcacttattctgtggtacttctaatttcttacttgactgttgtctgttttcttcctcttacgaaatcagaaaacttgtctgtatcctccgctcatagcagaatgcatggtacatggtagatgcttaataaatatttgaataaaagattactttaggaaggccttacaattatagttgattatatcttgtactgagcctcctaccttctgtgagaatctgttttaagcagataggccttagtctcagcctgtgtaaataaataatacttattgaagatcctctggtcacttgactcaaattacaataaataagacaactgaaaggggaggtgtggtagagggagagtagttttctgtcactggagcaaataaaatgagttgggagtaattgatagataacatttttgatattactgaataataaccattctttattaataaaagtgatacaatgatcccattgcttatgttcttaaagttcccttgcttgtataacccaggtcagaggtttccaaattgtggaggttatcatagtttaaatacatactgaggttgacaccctatttgaactacagtcactctctggtttaacatcattatagaaggatccacattgaaactacaaatcagtagttaaatggttgttattgcatctctgctccaaaatataatcaaatgagttgatttgtgtggccaagataattcaatgaaaccatgtttgcattttggcaactcctctatgcaccaaatgtaattaaatctaacaagcttcttttttttctttatttttttaacctactacatatagtatactttacttaatattgagaatcaaagttccattcgtcaatgttttcagctagcatacactcagtatttattatgatctagtttccccttgggatatctggaaacagagacaaatgaaatacagtctcttgttttgcttggaaaatgtccagagggaaatatcaataattcaataaaaatcataagctaagaacacaagatgaactcttgttaagagaaaatatgtgggtcacttggcatcctgaaatacttgaacaagttttctgcatttacatgagtagcagatgttctgaaggtgaaagtcatgtactctgtctattcagtgaagataaatgatgttaatgatgtctctgtatctggagatgctcctgttaatgctagggctcatgggagatatttccttagtgaccatcatatacccatagtcatcaactcttaaagtcactgtgaattacagttcaagaggcttgttctatcttgtaatgtcatgtactgtctagttaatttaatatcatggacaataaaaggcaccaatgaggaattctggcaggtcatttcactttcagcttatttgtggtttggagattgatgaagaagctgtgcttttcctttggggtgatgattacatagaggcaataggcaattttgctgcattagctttccctagcctctgaccatgctgtggctttggtagctggcaacaccaattgccagtcctaatgtttcctgcaatccacttagattacttatgtgcatgatgatttagcagcaaaactggggaggcagggttattttttaaataaatcaataatgtttagcttcctcaaaaagcaaaggggtgatgcaattaaatgtcagctgatttgaagayccattccatacagaaaatggatgtatggatggggcatacaggaagcaagggatatattctggggcagcataatgactttaatggaataattgatgtgtgtttgtgcttatcatatgtacatgagtataaaacatatacatcaatgcagaccttcttgtttgagggatattgcagtggtactaagaattattttgagacttaatttatactcaaatagaccatgttctgactatcagtgtcttgaactggagaaattataggcattttttttccagccagggtaaaaagctacactcaacctctaaactttatatgtaacttctaagacttcctagctcagaaggaaggatcaagcatttttcctccaatacttttttctttcttgtttcaactatcattggcaatgagttttagaatgctacctttaaaaagggcatgaaagttgtgtctctcctcccttcctgattcccaattgccaccgcaaagcatttcataagagcatttatccacaaatgaattttttccctctttcttctttttattagtaatcaggaaaatttatagtttatttgttacaaggagagtacaacacaattagaatgtttatcccaaataatgctaactatgttcsggaactcaattaagaagctgttattaggatttctgtgcaagtacaatgtagagaagatattgaatgcctcaaggtcagtactatggtaagaggaaaaaaataccgctttagatgaaagtatgctgtaaaatccatagctcttgtcactggatcctcaggatatttgtcaagacacaaggccacaacaccaggaaggagggaacccagaggtgcaagtgaaaatggtggaatggtagcaactacaggccatttcagttcagcataggctgctgagtgaagaatgttctagcctggacagaaatctgagcaaactgaggattagtaaggcttgggaatataaggggtggtttttgacatcagtgaaasggcatggaaatgggaagattatgatttactctgtgagatggactcatgggtaagaaaaataaaggaaaggagaagatggaggagaagaaacaggaagaagagcagcaggagaaggaaaggaggcaaggaaagaagggaaaaagaagcrgggggagaagggaggagaggatacagaggcartttttagggaagcaggaagcattctgtgagcacataggaagatgatgagtttccaggggcttgcgatcctctccttgagatcctagaatcctaaaatttcttgtcttgctcaccactcacccagatcaacatatagacagacattctattgtttctgtgacacagaaaattctttgcaaatactttttgtcaggtatttgacttagaaagctattaaatccaaaaacgtgtgatagctatgggttttaattacattctaaactcgggtttatggcatgcctcagctttgttctgctgttgactaccttttggattcatcttataagtaaagtgataatctctagacattatgtgaagggctttgaaagtccggctttctcattgctttgccactgtaaagaaattctgtagcatttactgtgtgatgtggataaataactgttggatactttttcaatagacaaattggtttaattataattttatatttgtgtagtggattacccgaaggatgggcttagtctatgtacatatcaacagaattcagccatgtcatagaagatgtattgttgaggaatatgttgttgtaagtgatgacaaatccaacccaaactggagaaaatttattggttcaaatgccaacacttttgtagtacatttagctctagatatggttcaatcagcatttaacatttctcctgacataggagaaagttaagatccctaggatatgtcttaaaattcagactgtttgccattgagcackatgctttagtacaacctattgaattctttatattttgaccctgaaaagtctcaaattttgtgaaaaactacagtagcctgtatacttcttgacagtgattacttacatagtagggacaataggtctgtgttgagctgtggagaagcagatgtctaggcttattcttgagctaagtgacttgctcttggtgggcaaactcaaagaaagcatgattcaaacacaggctttgggaaattttttgaattaatatgtgttaagggtatatgggatcaaaataatataataccaagtccaaaatactaaactggtgaaatgcgaaagcctactgtaatgtgaggtgtgactcagatgtgcttccatatagtcccagaacacctgtcccaagttcctagatgggatgcatataaagccctaagagaataaatctgattttaaaagttgcaacacaagaaagttggttaaacaacaactactgaaagtacatgcatgcaaatttacaaatggaaaagtagaaatcatagagcaatctgagtccatatgagaaattaaagaatgataagggaggcatcacaagtgagtgggaaaatattattgaccatgtgagactggaacaattgaatagctttttttcaaaagatatcatgatagtgataagtaaattattttttgctaagcataaaacattgatagtatgctaagaactatgcgagtattatctcatataattgttacagcaagcctgtggcaacaacaaaactattatctctgattttttgcttttctttctctaataaattattggaacatgctgctaactagtcactgtatccactctttcccatttttgttatggtgatctgcagaaagtttgaatcagatcatatcacaccacacacacacacccacacacacacatacacacattcacgactgccttctyattgccattgaactaaaattcaaacattttcccatggcctatatcctacatcacctgggatccaagattcccagaactcttgcctaaggattctgattccatagttctaggatggatcctaggaatcaatgcattcaggaagcattctggaggatacttgggttttcagaggtttgggaagcatagcacaccacctggcctatccctgtgtctctgagtccatctcctaccactccacctctccttgactccctgcaaactgctctggccttctctcttcctcaggacagtgagcctattcctgcctgaatcaggaattttactcttgctgttctacctagaataatatacttcctgcaaatcttgtgtctagcacataatgaaggctcattaattatttttaaattaataaataaatgtcaaataacagaatgcagttgttttggacactgagatgatgaaagatttcttattgcatttttttacttcaacctgcagtaaatttcctacttttttcttcaccttattacttaatttttttttggaaagagtctcgctctgttgcccaggccacggtgcagtggtgcgatcttggctgactgcaaccttcgcctcctgggttcaagcaattctcctgcctcagcctctcaagtagctgggackataggcacggaccaccacgcccagctaaattttttgtatttttagtagaggcggggtttcaccatgttggcccagctggtctcaaactcctgacctcaagtgatctacctgcctcagcctcccaaagtgctgggattacaggcatgagccactgagcctggcccctacttaaatttttaacagacagcttggatagttttcaggaacaaatttcaaaagtagaaatgtaaaaccaaaaagaaaataaacattgggaacataygccatcactgaaagaaggagggcactgtcttacacctagccagggtgacactgtttaaaactacagcttccaaagacatttatgtccacctgcctacattatttttcttcttagtacttatgaagcacttctagctaatatcttttatgtctctttcttcccgagttataatgtatgttccacaatgttgagatttttttattttgttcctgctgtatttccagtgaccacaatgatataggggctcataactatttatttgatgaaagaatgagttgatgccaaaagaaacacaattcaaaagcttgtaattaaataaatagtacatctcattatcaagaaaatatgattgaatatgcaattttaacacttaattacccattatatgatctcgttttacattttctctccccacctagagtagaaattccattaaaaatatacttgttttgtatctataacctttcaatagcaaatgcaaaatagctagtcaatgaatattgatgattgcttaatctattcccaggattcaaaatcatttgagttgacttaaaggatccataatagccatttcacagatactaataaaaaataaaatacagctttcagttagattttatttttaagaaagcctagaaaaagaaattcaatgatctactccagaagtttggttgaacttttgttctgctcttaacttaatgttaatgcttcctattaaattataagatcttcttatataatcaccttcttatataatcgccagactagcattgcagaaagctttatgctcagatttccccagctattactgtatccttgcaaaatagtcctgaagtagaaattccgttcttgagcttggcatcctgacagtcataactgtcaccatctgttgcttttcaccatttctagctattaaagcagcaaggacgatgctggaatgcactctggaaaagctagaggctaagcctcagcaatgtctgtgtgaggttacaaccctggaccactcagtgcatctgcttgtttgggatcatacacattcactattaggatgactcaagtcttaagagagctggtttaattgattgtcattaggccttgctctccaggtgcagtgaatgagcagggaataacttagtaatatttttgttctaattccaaaaattatgcattttcatacagttgtagaatatttagaaagwttagataaggaaaagcggaaataaaaaccatccataaccagccaggcgtggtggctcagcgtgtaattccaacactttgggaggccaaggctggtggatcacgtggtcagtagatcgagatcatcctggctaacagggtgaaaccccatctctactaaaaatacaaaaaattagccgggcatggtggtgggcgcctatagtcccagctactcgggaggctgaggcaggagaatggcatgaacccaggaggcagagcttgcagtgagctgagattgtgccactgcactccagcctgggcaacagagcaagactccgtctcaaaaaaaaaaaaaaaaaaatccttaactgttaaataactaaggtaatcttgctctctctatatattcttttctatgtacaggtatgcatgtattttttacaaaagtatgaaatctgcatatatgtgctttgtaattttttagttttatgtttacattatggatggctttccaagtcgttaagtatcattgtacagcatcacttttaacagctgctaaaaatttcattgtatagtagctttcacattttatatattgacttatattcccaatacagtcactgatttaaggccactcatcctgagaaggagaaataaatgatgacaatatctaatatagtattattttctaagcaactgcccaattaatattactgagagaatttggtgagcttatctcagggaaagctactttctttataaattcttcatataattgtaatataggatctaatttttttcatttgggcaaattatgtacgtttcaaagatcttagaccttaaatcttaagtaaagtgaaatatttaaaatagccaaaggagtaaacagaacaaaaaaagagaatgttctgattagaagatacaaaacattctatttcagaacttatctttgaggaagaaggacagtgctgttcctctttatgttggagcctgcaaaactttttttttttttttttttttttttgagacagagttttgctctgttgcccagactggagtgcagtggcacgatctcggctcactgcaagctccgcctctcaggttcacgccattccctggcctcagcctccggagtagctgggactacaggcgcccgccactacgcccgggtaattttttttttgtattttttagtagagacggggtttcaccgtgttagccaggatggtctcgatttactgacctcgtgatccgcccgcctcggccttccaaagtgctgggattacaggcgtgagccaccgcgcctggcaaaaaaatttttaatccaaaatttccacaataatgtcaaaaagggggatctgcagataaacaaaaatagtatcttttctctggagcaaatatttacttggagctttcagttctctctaaaattgcctttggttttccagttgttaagaactgttctcccgtatgccttttgttaatgactttgtccccttttctttctttccttctttgtctatttatctgtaatcataagtgcctgtaaatcatgcttactatcttgttactattcaatagttcagttaaaaatctcactgctaatggatgattatactgggctttcggggcatttggccctgctcctgagtgatgggattggcaccacttagcaaaatgcttaggtttctcactgtgatccctatgactcaggtggtagaagcaacgtgtttctttctcttkytttaggaaaaatacaaaagctaaaagtccctagaaggttctctccctgggcaaagttaagaagcttaactcccagtgctagtctacaattggaatgtgagtctagagttcagacaggtcacagccaaagctttagacctgggagatatccacagacccatgcatggctgttaacactgtttgagtgggtgagagaatgcagacagagggaaacaatagaatagaataagctattactgtggcagaagtggaaagaggaccaacacagagaaggaacagatggaaatgtaggagcttcattgtataaattcttctggcaatcttgaccactcaaaagatttcagccaaatattagattttcatgacaatcaaagtctgcttcctaactaatcctttcattttttttcctgggagggtataagaccccagatctggctgtgacattattaagacatgtgaaataaaactcagtattttaataaagtaacacggtttctactgacatttaaaaaaactcaaaaaatgaaaagcacgaagcttttcatttaacttagtatagtccttggcacacaacagttcttaaatacttgcaccaaaaagaaagaaattatctgcaggttaaaggagagaactaggggggaatgtggagaaattatcaaaataagccaaggtcctagcttaagctgtgtgaagatattgttattgttaagatattatgcacacttaggtaatcattcggcttaccagagaagtggtaagactggggaaaacattggaagtaattcaaaaatagccatagcataatacagkggctcaaatccttgctgtttcccctctaatttttatgtgacttaagtctgtgtttcattatcttttttattgttgttttttgagatggagttttgttcttgtcacccaggctggagtgcaatggtgagatctcagctcactgcaaccttcaccttctgggttcaagcgattctcctgcctcagcctcccccgtagctgggtttacaggcacctgccaccaggttcagctaatttttgtatttttagtagaaacagggtttcactatgttggccaggctggtcttaaactcctgctaccagcctcagactcccaaagtgctgggattacaggcatgagtcactttgcccagccttcattatcttttaaatgggaggattaaaattaccaacttcatagaggtgtatagattaaatgataaaacacattgaatactcttacatgtcacctagtgaatagtgaacactcaataaatagtaactataggaagagaaatgttattgctattttataggcaaagtatacatcaaagtaactcgttaatataactgggactcaaaccagtagcggaatagatgaggatctggagcttacaaacacttgaggatatgaagcctctttggatcagtgttggcaacaagtaatataagcctaaacattagaaaatgtctgtcaaggaagaccagcaataggtttcagatgaagattttggcaaattaaaaaaaaaatgggtcttactcaatcatcatattcccagtcactatgggagaataaagtttttataaataaatgtaaacacagaggcaaactcttgcgtcttgccggactggcctccttgactcttatttcttgtttttcacttttctccaaagtgtttagtatgataagggtgggtctcctggtgatgttttagtctagagtgttcttggtgttctatatcctctgggaagccagggggtgggcagcagtcacggtagtgacttargatacagattctgaccatcactcctcctatctatcatagctagtgatggggtgcaaagaatcttggaatcagcaataacaagtaaaggaatagttccaaaaggaaatacctccagggctaagccrgtgtaaatatttaatgacaaagcttctagatttggagatctcttcactttctcttgcgcaggattagatttcaatttgcttcttggagtttggaaagaaagatgttgatgtaggggattcagtggtccagacacaggatgacagaataaaaacctttaaccaggttgaagaagattggtaatagagttatcggtatgaaactaaacaagaaatccaacagcgtaacgcaaaggctgtgtcacaatagtgtcacaataaacacycaatactttagaagagaaaacaaatataggaaatattcaactctccaccctttaattaaaaagaaaatatcctttccttacgcttatcttaagagaactatttcaaatatatttgcttcttctcgctgttgaatctattcattgtgtcagaatgacttcagaaatacaaacacgcatgttgtcaccatagctatttatcattgtcctttcataaagaagattgatcagaatcttctacttaagacgttttctaaattttgtttttgaaggatgaaaatataatccagccaatattcatatctcaagttgtttctttccttactaggtgacatatttggaccctttgagtctagcaaagtcaagagaacattaccaactttagatatctttccatttggcctacattttcacatggtttaggcttttgactgaaacaataagttagcagcaaataacttccaataaaaaggcccatttttgaggggataggccaaatgttcacaaacaatttctacaattgtgggaagaggtgtgtgtatgtgtgagagatgtttgccctcctctctgaaaatgatagccaggtgataaaaattccaagacagcctgaaggacttagagaatactgagaataatatgtgttaggatgaccagggtgaggaatctgtcttactgctaagtttcccttaattatttcatgctcctattgctgacctagtgaagctgcattatttaagaatttgtttatttttcctgcctgagaacatggcaactagaattacggtttttaacctgaacaagtacatgttgtttctatgtgacttgagccatcaagttcatttctgtttctttttttgaagctggtctgtttttaaataggaaattttaggcagcgtatagcaaaatctacttgaatgggctgctaagcaaattctttggatataggctttaaaaaatcagcagtcattgtgtgtgggaaaatgaattacaaaattttttttcatgtattacaartgatgatgtcatctatatgttaagtataacttttaaaataaaaaatcaaattgataaaatcaagtctatgccaagctggattattaaaaatagccaagttaaaggaaacaatacattctggtgaggagcataaataagtcatggagacttgagaatctgtaagtaatatctgtaaggaactagaaataagcaaggacaatgggcttctcagatgtgtaaagatttcgaatggacactgaattcttgctccttgaaacattcattcattcaaaaaaattatttaatttctgctgaactctaagcagtacaacagactctagggatacaatagggaacaagataaacaagatcattgcagctgtgtagtttataytctaatcgaagaaagacaacaaarcaagtaaacaaatgaacatgataatttcggatagtgctaagtgcaatgaaaaaaacaaaacaaaaccatgtggcagggagaaaatagtggggactaccttacactggatattgaaggattctgttagatattcagagatactttgagagtaaatcaaggtataattagaagctgtgtggtagaagaataactatggagtcagtagaactgtgttaggatcccaaattaggcatttactaattaattgtgtttccttcaatgactaagttagcatcttgtatttcagtttccttgtttataaaaaaaagtgatactcataatacccaccctatggaattatgggaattgaatgacataaggtattgaaagcatttagcatcactcttgacacatactaagatccttataaaaattgactgttattattaacattatatggaacaatgaaaaatgtatctttttggcctcagtaccaagaaaacttgtatttctcctaagccattggttggctggtgattatacttttaaatgcagagaatcatgattattttatttcctttgactgctaaaaagctgagggccaaaattgtggtttacgtctaacaaatacagagacctttactgaatgcctaatttattttgtgaactaacctcattcttggctggatgttttcttcactcatttttcctctaatttaatttttttatttccttactttttattcaattatattttgtattatgcgtgtttttgcaagctgccccaaatcttttctgtaacatattctgtctaaacagtcactacgccaaaatagcaatcagtgtggacaagttgagtctgaatactacacagcaagaactccccttacagggagaaattgtttatccattgagcatgaaaaaaagaaactatatttcttaagatagaattacaatatacataatgttctgtttggctcattgctcagcaagccccaacatcagtccaatcttaatgttggggaccaattctccttcctaatgtgagcagcttgaggcagtggtaacagaatggttttggaagtagacatgacgggttcatgtgcttgttctactatagactgcctttgagatcgtgggaaaaatcaatgaacatttctgagtctttgtttcttcttttttttttttttacaataggatctgtaaatttctattcttcaaattgtttatcaacattaaaaataaacaaggagggaggtaactacaaaaggataccttgctttgcaatataatgtgccatcagttggttttacatatcgtttttttctttttaattatacttaaagttctagggtacatgtgtgcaatgtgcaggtttgttacatatgtatacatgtgccatgttggtgtgctgcacacattaactagtcatttacattgggtrtatctcccaatgctttcccttccccctccccacaccccacaacaggcccyggtgtgtgatgttccccttcctgtgtccaagtgttctcattgttcaattcccacctatgagtgagaacatgtggtgtttggttttttgttctttcaataggttgctgagaatgatggtttccagcttcatccatgtccctacaaaggacatgaactcatccttttttatggctgcatagtattccatgttgtattatgtgccatattttcttaatccagtctatgattgatggacatttgggttggttccaagtctttgctattgtgaatagtgctgcaataaacatacgtgtgcatgtgcctttatagcagcttgacttataatcctttgggtatatacccagtaatgggatggctgggtcaaatggtatttctagttctagatccttgaggaatcgccacactgtcttccacagtggttgaactagtttacagtcccaccaacagtgtaaaagtgttccyatttctccacatcctctccagcacctgctgtttcgtgactttttaatgatcaccattctaactggtgtgagatggtatctcattgtggttttgatttgcatttctctgatggccagtgatgatgagcattttttcatgtgtcttttcgctgcataaatgtcttcttttsagaagtgtctgttcatatcctttgccccctttttgatggggttgtttgtttttttcttgtaaatttgtttgagttcattgtagattctggatattagccctttgtcaggtgagcagcttgcaaaagttttctcccattctgaaggttgcctgttcactctgatggtagtttcttttgctgtgcagaagctctttagtttaattagatcccatttgtcaattttggcttttgttgccattgcttttggtgttttagtcatgaagtccttgctcatgcctatgtcgtgaatggtattgcctaggttttcgtctagggtttttatggttttaggtctaacatgtaagtctttaatccatcttgaattaatttttgtataaggtgtaaggaagggatcgagtttcagctttctacatatggctagccagttttcccagcaccatttgttaaatagggaatcctttccccattgcttgtttttgtcaggtttgtcaaagatcagatagttgtagatatgcagcattatttcttagggctgtgttctgttccattgatctatatctctgttttggtaccagtaccatgctgttttggttactgtagccttgtagtatagtttgaagtcaggtagtgtgatgcctccagctttgttcttttggcttaggatggacttggcaatgcaggctctttttkggttccatatgaactttgaagtagtttttttccaattctgtgaagaaagtcattggtagcttgatggggatggcattgaatctataaattaccttgggcagtatggccattttcaccatattgattcttcctacccgtgagcatggaatgttcttccatttgtttgtatcctcttttatttcattcagcagyggtttgtagttccttcacatcccttgtaagttggattcctaggtattttattctctttgaagcaattgtgaatgggcatgttaatggtaattgtaatacctgacctggatacctcatttgattctttctggcatcagtaaatgtgttctgtaaagcacattgaattgtaattatgtcagttatcatggttctggtattggtagtggggatgaccatgatgataattgacagggttttcattctgttgctgatctactctgattttggagtaaatcttagaagtgtaatgggcttcttgccttggacaaatttaggaggtacccttcacacttcagtttaagtaaatggcattccctggagctgtgcatcacacagcctacacagccacatgtgctggcctgaccgaagccctacttacattccatttctagttacctcatcttccctgcctgagtgtctgctttgttgagccaactggcacgtcagttcctctgagactggaaagctggctgcttactagttttgactttgaactttggatctcacagccagcccacttctacctggtgatagcttttcatgtcaccrtggtccacccttcttgtgagacacccaactgctactcttatctcctgagagcccaaacatcttttccatcagccagaatgtgctacccaacacttgccatatgttcacctcttatcacctacttctagatctgactcattcatttcacctaaattttttttgaattaaataatgtagcgattttcctttgagttcttaacattagctatattatcagcaacttctgttagaaagaagactattttttaaaaaagatgttattaatccaaatgcaaaataactcccaatttattagggaagatcaagtaataaagatgccatacaattaaacacacactctaggtaattgaagcttacactcatgtagggatgtaaatctttttaatttatatttcctttaaatacatacataaatttgtattgttctgaaaattgggtcatacttactctgcaagtggcttttcttaatatgtcataggtataactcagtctttagatataaagtcaaattatttcttctaaatagctgcataattttcacgtttgtatatacactactttctgaaactattcttctgagtcaatgtacatctatttcatttacagagttcattctttgtgtatgtgttttatgtttgccacacaaaattgctatgataatcatcttttatagaaatctttggagaaagaggaacatgtctatgtatgtgtataaatgatacatatttatgtatatattatatatactacatgtttccttttacatttacatatatatgtccttttccattkacttccttttccatttacatatatatgtcaattggatagattttcaaaagaaagattttttagcccaagagtattttaattaataaattaccaaattattattttttgaaaagttgtagcaatttatcttcccaccagcaatgtgcataaaggtgcctgatgtactcatagtcttaccaggagtagttcattgttgttctttttaatttttgctgaccagggaggtgaaaactgtacctcattactgctttcctttgcatctccctgactatggaaaaggacaacatctttcatgtgtatcagttacttggaattcctctcatgcaaattgtttaatcttatctggtatattgggttatctctttctcaacagtttgtagctgctctttgtttattggaacataatccatttgtctgccatatgggttacagatatttcttcctacataatcacttcccttttttctgtgtctttttttaaaaattgttttgtgttcaaacatttttgtctctttcaaaaaactaccttttgtgaccctgtctttttttttttttctacttagcaataaatcccagtcattcttacaaggcggatttaacttatttataattccctggtttctttatatgtagataaacttctgcatgtatacttctacataggtaagaaatcattgatttcatttttgttgcagccatttttgtttgacattttattggcttccttcccctcttctccattcttttacccacttcattgtcttctattgaacctccgtatctcctggtccatcatgctaagaacccaatatgtatatgtattcttccatttattttcttcatgtttaaataatcatacactcatacatgcacaatcacacaaaaatatgtacatttatacctacacatatccatatagaaattgtgttgttttgtattctacaaacgtggtctaatattatagacacttctctgctttatttttcctttctgtctcagtaatatccakggaaaactttcctactcaatggtcatgattcatgattctaactgattctttttaatggtgcatattacttcatggtatggttataccataasttattcaaccattcctctatgaatgataattcacattgttaatacctttatttttggccatatgaataatgttataaaaagatctttgtacatttgctgctacgtgctagtgcttttatttctgtggaacagattcccaaacgtgaggttgctattttttttttttttttttttttgagatggagtctcactctgtcactgggctggagtgcagtggcccgatctccgctaactgcaacctcctcctcctgggttcaagcrattcccctgcctcaggctctggagcagctggtactataggtgcacgccaccacgcccagctaatttttgtatttttagtggagacagggtttcaccatgttggccaggatggtctcaatctcttgacctcgtgatccacccaccttggcctcccaaagtgctgggattacaggcgtgagccaccgtgcctggccgaggttgctttttaacaaaagttatatgtaactgaattgtttcccgaaagataatgacaatttgcatttccaccaataatttctggagtatccaccattcatccctaccagaatcactctttgtttttgtgactgaaaggcataaatttatatctcattattattctagtttctcaaagaagttaccaaaaataacttgccctttctgtacaactccagatcattcatcattctttactgcatcgtgcagtctgttagctttgtgagtttcctgactctctctgaatatcttggtcgccacctgtgcctgactccagtggtctccttrcccatgccaccactctacttatttggttgtctctgatatgtttgaaaagtttgggcattaaaatcaggggactttttttgttcaaaatatttaaacatcagtcaataagactcttactgaagagtaaaagtatgggcccaaagagtactgtttatgattttagcttgatattttaataatcattcagttcttaaagaaaakttgccttccagaaaagtatcttagttaataaaggacagttaaaaggcttgagttctgctccttaaagctgttgaataccactttcagtctaattagggtattagtagcctcagaacccacttagcacatagcaggaaaactttttaacctaaaatcatcagcttagaatagagtggctatctccattatgacatcctgacaaattctataatgctgtatgtttacacttacccacatactgctatcacaacactcacattcacaaacactctgatttttagagtgtcccaaacactgccatgtggaaacatgtattttctcttacccaccccccaccactccccgacattgtccctggtatattctcatgataaaattgcagcctagacatatgacttcaggaaaagataataaagatatcacacagaaggaaaagtaacacatggtaagtgtggtcctgtacatccagcactctcccagggaagctagtcttcatcagaggattccacatatttttgttccatagattcatccacagtgagaaaatccctcagttctcttaaagacgttgcattgktcatttcaattccttttacttttattgtagactcaacaaagctgacttctgtttagagatgggcatctcatccagcttgacttcagggtgaaaatgcaacaataaaaaggattttaagaattctggttcctctgcaattgtttctcagtgtaaataaaatccctaggcaccttcatttcccaggcattttgactggcataagttgctctctcagggttccatcaccctgggcactgacaagagggagtgagtctcaaggctcagttccacatcatggagagctggcagcctgatcattttgctccactgtgaagtcttgatcatttcagtcacttgatctccaaatttataaactactcataggcgtaggagtcttacctaccacctgtccaactcacttattttgtggatagccccaagaaatatgagatggcttgtttgagacaggaagctcatcagagacaaaaagaaccttgaactggatcatctgaattcatttttttctcataaaaatcaggatattaatatcagttctgtttccctcacaaggattttagtaatgatcaaataaattaaaacactttgaaatatttatattatgcacaaatgccagatatcataaaattgttttaaagttcattgttatatttcttctagtaggaacatcagacatcactggatggattacaacagccatcatttactgagttactgtctatgaataggctctctaacaaagtcatctcatttaagattgtcattgtcacacatttacccttgccctgaaaaggcaaaatggttgacttggtggattgttttttttttttttttttttttttttgagacagagtctcactctgtcgcccagattggagtgcagtggtgcgatcttggctcatgcaagctctgcctcctgggttcatgccattctcccgcctcagcctcccgagtagctgggactacaggcacccgccaccacgcctggctaatttttttgtatttttagtagagacggggtttcatcatgttagccaggatggtctcgatctcctgacctcatgatccgcctgcctcggcctcccaaagtgctgggattacaggtgtgagccaccgcaagcggctgacttggtggattctgtaaacaagcaggaggatgtttctgctatctttcctttgaaaaacatttaatatgggcaatatattgtatgcaaggcctcaaactcaggaagaccatttccagtgtccacatgctcaataaccctggttcctaaagcctacttcatgtgccattatgtgatcttctatagaaatacaagtaattttacaagcatgaaataaaagttatatctaaatgtaatttctgtttacatttttagatggccttttacagaatgaactttagaaaaaaaaactaaatgtggctacaatcaaatctgtttatgaaaatcacgtctattttataagaaaaaaatagagctaagaaataagattactaaatttatttgttgtttggtgttcagacaaatgtttgtttttacaagaacaggctcaagagagccactctgaaggccagtgttgttacttctccaaactcttctagctgtcttcactcatcattattataatctttatgggaatgaggccaaggtgtgacctgaggtgataagagtttccctgctcaaaaatatatactcaagcagtttgtcacagcctaaaatttcactatcagagaacaatttactctaacaggaacatttaatttctaggatatcagagatgattaaagtctttaattttactcttaactgacaaataataaccatatatatttctggagtatcatgtgatggtatatctctgtatacattgtagaacttgatgtttaccatactcaagtactgagacagtccccatataatttttctaaatattgccaacaaagtattcatttctacagcatgctttattgatactgaaattagaatgtatattgctataccagggaaactgtagattcctacccttgtcctaagggaatgaatgagccttcagatacataattttgcccatggagagaaagaatgatctaggtttggaatagcctctaagagcaaagtcaggccaggtgcgaggggagatgtgagcagtcagagtgcaaagcgcagggcatgcacacctaagatgtaggagtgggagcaagggtgatttgtggaatgagcagctctgaagacaaacttctcctaatcctatgtatccctcaggctgagtttgctgctattgaagtttttggccaagtacccatttgccagaggggctacacatcacagcctatcagctaaagttagcccacagagagtctgttagtctgtgatgtttgaatggaattgaaggggagcaccctcaagcagagcctacaacccaatttgccacaagccttaacactggtagatccctctccgttactcattggccttccttcctggctcctgagatcatttgagtttgtgatgctggttttggatttcaaagttcagtgaacctctatttcccaagtgttggttatatttttagtctactctaaaatgtgtttgtgcccattgcctgttttattcaagaacaagtctgtgaattcatgttgctttacatattctctgctcatgttgctttacatattgcacagtattaattaatgcaataatactgtggaaatcttggtcaaaatgttactgtgcatctttgcagagcctgaagactgctgaatgccacaagcacacagtctgaagctgctacaattgaactcttctttaacaagcatcagcaacacagtgtacatattggacatgatagttgtcaggatgacttaggatggttaactttttgagaagcctctcattcttttgacattccagtgacaggaggttttattgtaagtctaacgttttaacagtgccggaagcatatgttcattcactgtctttgggagattaggacattgaaatgagatgtaaagatttttgttgtcattcccattgagcgctaatttgctgagaatagggagcaaaacttaatcttgtgataatagcaaatctgcagaataaagagtagcagtagggaataacaaatcaatttcttccatttatagggttcctatattcacaaagcactatggtagaggtttttcattctactgtctcataactctgtgtgatattattattcccattttgcagataatgacattgaggctcaggtaggccgtcactcaaagtatctcatttattttaaagatgatgttctttccatcatgttgctctgcatcccctttcatctgtgggctttggaaatggtctgatcagaactggagatgattgatggctactgtcctgggctcccagcagaataattgtttatgtagagaaggctgagggccttctaatagacagtagtttccttcagggtcaaggagctcttaaattcatggcatgggtccggtgaaaatgtttcctctttgactctcccctcccacagccttctctctgaccagaagaggttgtccaactctttgtgaacttctgtatggctgtgttagattcctatggctgctgtaacatatgactgcaaacatggtagcttcaagaatacaaatttattatcttatagttctggaagttacaagtgcaaaatcactgtttttggctaatgtcaaggtgtctacaaggctaattccttccggagattctaggggaaaaattggttccttgccttttccaccttctatagaccacctcattccttggctaatggtccccttatagcaatgccccatctgacctcttcatcagccatcatatctccttctctctctgattctgaccctccctcttgtaagaactccagtgattatattgggcctactaatccaggataatctcccatggcaagatagttaacttaatcacatcgacaaagtcccttttaccacataaagtaatattcacaggtcccaagaattaaaacacagacctctttgggggcctattattcagtctaccacagttgctaaccctgttgatttctccatggataatagtgtcccactttgggcaactcaggacagctccatcaacttctaggacgcagcatctggagttcccctcgtgtgagtctcctcaaagcaagactgtgattgccaggtcaatctgcactcttcactgtcaaacagggcttgcaatttatagaccacaaactggaccagacatattttgagtgaccctcagtgagccttttttcttaaatttggaattctattgtctaaaaatacattttaagtattttttttaattttattattattatactttaagttttagggtacaagtgcacaatgtgcaggtttgttacatatgtattcatgtgccatgttggtgtgctgcacccattaactcgtcatttagcattaggtatatctcctaatgctatccctcccccctccccccaccccacaacagtccccagagtgtgatgttccccttcctgtgtccatgtgttctcattgctcaattcccacctatgagtgagaacatgcggtgtttggttttttgtccttgtgatagtttgctgagaatgatgatttccagtttcatccatgtccctacaaaggacatgaactcatcattttttatggctgcataatattgcatggtgtatatgtgccacattttcttaatccagtctatcgttggacatttgggttggttccaagtctttgctattgtgaatagtgctgcaatcaacatacatgtgcatgtgtctttatagcagcatgatttataatcctttgggtatatacccagtaatgggatggctgggtcaaatggtatttctagttctagatccctgaggaatcgccacactgacttccacaagggttgaactagtttacagtcccaccaacagtgtaaaagtgttcccatttctccacatcctctccagcacctgttgtttcctgactttttaatgattgccattctaactggtgtgagatggtatctcattgtggttttgatttgcatttctctgatggccagtgatgatgagcattttttcatgtgtcttttcgctgcataaatgtcttcttttcagaagtgtctgttcatatcctttcccactttttgatggggttgtttttttttttcttgtaaatttgtttgagttcattgtagattctggatattagccctttgtcagatgagtaggttgcgaaaattttttcccattttgtaggttgcctgctcactctgatggtagtttcttttgctgtgcagaagctctttagtttaattagatcccatttgtcaattttgtcttttattgccattgctttttgtgttttggacatgaagtccttgctcatgyctatgtcgtgaatggtattgcctaggttttcgtctagggtttttatggttttaggtctaacatgtaagtctttaatccatcttgaattaatttttgtataaggtgtaaggaagggatcgagtttcagctttctacatatggctagccagttttcccagcaccatttgttaaatagggaatcctttccccattgcttgtttttgtcaggtttgtcaaagatcagatggttgtagatatgcggcattatttctgagggctctgttctgttccattgatctgtatctctgttttggtaccagtacaatgctgttttggttactgtagccttgtagtatagtttgaagtcaggtagcgtgatgcctctagttttgttcttctggcttaggattgacttggtgatgtgggctcttttttggttccatatgaagtttaaagtagttttttccaattctgtgaagaaagtcattggtagcttgatggggatggcattgaatctataaattaccttgggcagtatggccattttcacgatattgattcttcctacccatgagcatggaatgttcttccatttgtttgtatcctcttttatttcattgagcagtggtttgtagttctccttgaagaggtccttcacatcccttgtaagytggattcctaggtattttattctctttgaagcaattgtgaatgggagttcactcgtgatttggctctctgtctgttattggtgtataagaatgcttgtgatttttgtacattgattttgtatcctgagactttgctgaagttgcttatcagcttaaggagattttgggctgagacaatggggttttctagatatacaatcatgtcatctacaaacagggacaatttgacttcctcttttcctgattgaataccctttatttccttctcctgcctaattgccctggccagaacttccaacactatgttgaataggagtggtgagagagggcatccctgtcttgtgccagttttcaaagggaatgcttccagtttttgcccattcagtatgatattggctgtgggtttgtcatagatagctcttattattttgagatacgtcctaccaatacctaatttattgagagtttttagcatgaagggttgctgaattttgaattttgtcaaaggccttttctgcatctattgagatcatcatgcggtttttgtctttggttctgtttatatgctgtattacatctattgatttgcatgtgttgaaccagccttgcatcccagggatgaagcccacttgatcatggtggataagctttttgatgtgctgctggattcgttttgccagtattttattgaggatttttgcatcaatgttcatcaaggatattggtctaaaattctcttttttggttgtgtctctgccaggcattggtatcaggatgatgctggcctcataaaatgagttagggaggattccctctttttctattgattggaatagtttcagaaggaatggtaccagttcctccttgtacctttggtagaattcggctgtgaatccatctggtcctggactttttttggttggtaagctattgattattgccacaatttcagagcctgttattggtctattcagggattcaacttcttcctggtttagtcttgggagggtgtatgtgtcgaggaatttatccatttcttctagattttctagtttatttgcatagaggtgtttgtagtattctctgatggtagtttgtatttctgtgggatcggtggtgatatcccctttatcattttttattgcatctatttgattcttctctcttttctttattagtcttgctagcggtctatcgattttgttgatcctttcacaaaaccacctcctggattcattaattttttgaagggttttttgtgtctctatttccttcagttctgctctgattttagttatttcttgccttctgctagcttttgaatgtgtttgctgttgcttttctagttcttttaattgtgatgttagggtgtcaattttggatctttcctgctttctcttgtgggcatttagtgctataaatttccctctacacactgctttgaatgtgtcccagagattctggtatgttgtgtctttgttctcattggtttcaaagaacatctttatttctgccttcatttcgttatctacccagtatttctttaaaaaattaagagatctggtataacagtgtcttgttttgaggtggttgcgtcatggcttctctctttagacagaatacgtgctctctcaatcaccttagatcttgccatattatatctggtatgttctactcatttgtttgaactgcttggaccctgtattaagtatctgagtttacaacagtgattctaaaacaaagcattaacatacatcttagaggacatttgttcagataattttgtcagggactgtaacttcatatatattagaaaactttgagttaatccacatgggttcagacgaagcagaggatgagccttatcattcagtatcatcctaagatttgtaggttagctggatcttccctttggatatttcttttttctgcctgactctctcagcctttaatccaccaacacctaggcgaggcatttctcatcatcattttagtatcccttccgtttcactggaggaaaattttccacctgtcctctgtcacttggaaggtgaccatcctttcctcttcccaatctgtctcgtaagtatatcagttccttaatgtttaggatctgctttatttcaaataaagactttcttcatctgtattagtctgtttgcatgctgctgataaagatacacctgagactgggtaatttataaagaaaaagaggtctaatggactcacagttccacgtagctggggaggcctcacgatcattctcagaaggcaaaaggcacgtcttacatggcgacaggcaagagagaaatgagggccaaacaaaaggagaaacccgttataaaatcatcagatctcggtcgggcacaatggctcatgcctgtaatcccagcactttgggaggccaaggcgggcggatcacaaggtcaggagttcgagaccagcctgaccaacatggtaaaaccccgtctgtactaaaaatacaaaaaaaattagccaggtgtggtgacgcacgcctgtaatcccagctactcaggaggctaaggcaggagaatcacttgaacccgggaagtggaggttgcagtgagtggagatcccaccactgtactctagcctgagcaacagagtgagagctccatctcaaaaacaacaacagcaacaaaatcatcggatcttgtgagacttattcactaccatgggaacagtatgagggaaactgcatctatgattcaattctctctcaccaggtccctcccacaacacatggtaattatgggagctacaattcaagatgagattttggtggggacacagccaaaccatatcgtcatctttatgtccagtctcagagagtgactggcacataatggaatattaacaaatatgtgttgaatgaatgaactctgatagtgatgatggtatttataatgatagcttacatttatgagaacttaattatgcatatttgcttgaagtaacaatagcagtcatgatggagacaaattcattgtgagtgcctgcctcccacaggccctggaaaatcaaccctattgatcatgtgaccctctcttctgaccacagattaggggaccacagaagattcctaagccaaggactccctatctttggctgaccagaaacctatggcatggcctgttgcaaagagcattcccaagaaataagcttagcatttcagagcttttcccttttcataacccaaaccaagagacaacaaagtggaggatgcttggtcaaatgggtcatgctagggattagggactggttgccagtctggtcatgcacaaaaggaatatgcacaactaatgcagtcactgggagatagaagagaatttcattttctgattttgcagcttccagatacaatatacgtgagtcttggctgtctttggatgtctacaaaattacccttttgtatctttacaactttcctcttctgccttatctcagcgaggctatctgttctttataattaaaacacttgcctggaacattgccttaacccaggatcctagcatggcagtggaatttactaaaggagggattgtggagtagtagcattgccagagtcaagatcacaggcaaccaagagtttcgctttgggcactacaactcccagagagttgttctgaacagaatggagattcaacagtttaaagtactggacattttctaagatgtgagtgttcctgaatccttaaattctgaacacaaaaacagtgatgaaaatacccaagaaatatttcaccctgttatgaagcaagatgaaacaatagataattggttcattagaatctttggactaaaaaggatgtcagttaaacaaaaaaaactattaaaatttaattgaccattttaggaatcagcttgctaaatttaaaaagatgacatacttatatttataatatgcttcctagaatggttaccttcaaagtrggtataatctgtataaaataaccccagcattaatttttcacaaattaaaaagcatgctaggcaattaaagcagaataatagatgtaacattacataaaagtaggacagtcatgcatcatttatgacttccttgctcatcaggacttggctttttgaatcttaattgcaaactggtgtgaatagattgttgaaaaaagtaaattggttattctgatagcacacaacttgcattagggagataattaattttaggaggctgatatcctggtatattaagcatagttatatagtcatgtttagtcaagagactttaattatagtcttcttctggtcagtgcacattgtttatattttgtttgtaatttgatcaatgctagttagatacaatgtaagttattacgtattataagtgtctgtaaaagcaaagagtagggttagacctctagtagagaatagggcaattggttgattaaaagacatattctactacagccttgacactagtccacctgttcctccatccagtttccttcttccttttatgctttcttatctgtcaattgctatggtaaacttggacatgctttagattccaaatgagaggctattataaaacataagttgattgatcttttctttcttttttgaaaaattaagaaacaggtggaatggctggtgtacttcttttttgttctggaattattgatttaatttctttaatttttaccctttgaattttctaaccaccttagttcccttttttttattttattattattatactttaagttttagggtacatgtgcacaatgtgcaggttagttacatatgtatacatgtgccatgctggtgtgctgcacccattaacacgtcatttagcattaggtacatctcctaaagctatccctcccccctccccccaccccacaacagtccccagagtgtgatgttccccttcctgtgtccatgtgttctcattgttcaattcccacctatgagtgagaatatgcggtgtttggttttttgttcttgtgatagtttactgagaatgatgatttccaacttcatccatgtccctacaaaggacatgaactcatcattttttatggctgcataatattccatggtgtatatgtgccacattttctttaataaaaataattaagtctagcaatcgttgaccacttaactacactaattatactacaactctgtagaaaaggtacccttatcttcatggtatatatgaggaaactgagactcaagtaggttacccataggtaacttatccagggctgcagagctgaagctggaatttaacctggtggagacatagctttcagtaggccttggagaatttgctcaaactctcctaattttttgcacactgcttcactttttcctgggaactatgaacaactaccttactttctctactactaatcatggactttgttaaactggctgtgctttggtgtgggaaaggtctggtcatgagcaattctgatatatttaccttgtgccctcactctctgaccagatgtcactctgtttaaaattcttccttaaaagagcatgaccatctgagcatttgctccatttctgaactcaagtttacagtctggttttgaaatccaaactgtaccctttaagaactagattaggaaggtagtagccaattaaggccacctgtttgtatccacagtgttgtgcttggatgaatcctcatataaagaaagagattgatggccctttaacaatatcataactcccttagacagatgactgtaatttggtatgaggagaatgggtatatctgcttacccggccccaggactaaacaaaggtctctgtgatccaactgtgttcactgcagcctagaacacagccccaactgcgatcaatcccagtcattccataaggctttgggaaatttgcatggatgccattggaattaaatctccataaggatatttggaacagaaaagcccatccttcttacgcttttataaattttacaatccgactgatgrcttctacaaaagtttatcctatttttcatatgccaggcagttctcaaactcaactttacagccaccataacaaaagcgtttggggatttgaaaaatacttaccaattctaggaatgggaaagaccacatgtgaaactaattttacagaaacccatggcaaggaaatgatttaaccattacattaacagatgccctcagagactgtgctatgagatactctgtctttctccttagctggmatcttctccccatgtgagcatcccacctctcattccctgctaggccaagaggactttcctctatggagcttcttgaacactgttagtttatattagtcttgccctactctaattctagtttgcaggagttcttcgtttattcaacaaatacttattgagcatttttacgttctaagcactacattaaattctargaattcaacacaracaaaaaatccctgcttttattccaatggaggaagacagaccataaacaaatgcatgcatactatttccagcactaagttctagaaaacaatttaaaatggcaaaaataaaaataaaacaagcaagggaatagagagttatgtgtagacctggtttatataaactggtcaaggaagaggcttcagttgttcatactgcctagcacacatatgacacataataggaattcaaacatccagtacattaaatattaagtaaatgcttttttatcagatattttgtgtctcaaataccttaatatcctgactagtctatgttgtatatgttttacagaagaagactggaccttacatttattttcagatctctgtaaaacactacatggagctgggtctcagaatgttgctggttgataaatccaaaccttattgtgggattttcacaagtaagtgtgaacatacataagtaaggtagcacatacacatgaagtacaggacatggagcacctagcaaaagtttatttcatactaatacagaagtttccacatgtaactaagtatccatacattaaagtgaactttctgtctacctgtataatttctgaaatgtccatgggccttttgggctatccttaattgaaaggcagtctgaactctctaggtttgatttgaactgacttggtctgtatcaaataatgtcacacagaatttcatttaagaaagtatttcttaaaggagtatgttcatatgtgcttgtcattgtgttgaaaaactgaaaatatattttacacaagatgtatgtacttatgcattcatttccttagtttgactctattaaaagtgatgttcacacacaaaatgatatgctgccttgtggaatccaaaagagatgtatctgtagtactgaaaactgtcactgtatccttttgccagaaagtatcccagtgtggattttgtgaaagcgaagacctgtgagctttatgaaagggaagagtttaaacttaacccctgaggagggggaaaaaagcaatgacttggagtgggtacataataaaaagcttttaggataaggaagaaaaaataaaggagaattatttcaataacagaaaaggaaaaaataagctatgagttgagatcaatcaaaatgttttttgagcacttggtttgtggttatcactgtaatacctgtttggggaggggcagaaacatatgagttattttkccattagaatgataaattatttgggagaaaagatttccacagaagtccgtgtttacccagtgccaggatcttggtgtaatgagttttcagcctccctctcagctgatatatttgttgcctatttcttggaaaacagtaaaagacatcacaaagaaactcactccaattcctttcctgctyctcawatctataaacatctctagatctgtatatttcctttcctccttccccagagtgccagagaaatgactattctattcattataaatcttataccctcactagctccatcaattacccccctccctgagaatcttcaaccttcttcattagcatttttctctcagtacataaacgtgcttttatcataaaacgatgatacaattaacaacaaacaacttctctttggactctatgtcagtagttgtcaaccctggatacatattagaatcacctggagattgctgaacagaaacctggaggcccaactcagatgaaggggaataatatctttgaggggtgcagcccaagtactgatattgtttaaagctactctactgattctaactcacagctagagttgacaaacattggcatacgtgattctatatcttattctcttctccccttaacaaccagtcattcatctgtttatttccactgaattttaaagaattcacgaaggctaatataragttaaaatctatttagatgtcagaactggcagaagttggcaacagattggatgtcctggtatgaagaactggtgcttaagaaaccaatgctcaagcctttggtgccatttatttaaataagaaatacaagatcccttcctgttagagccaatgtaaaaaaaaaaaaagggcgaaatgctagaagaaaatcagatgaagtttagatacattgtgttcaaaatgcctacaaagcatatctagaagtataggcagttatcaggactcaaccgaatatataagcagttgccagctaaaactcattatggacttagaatggcaccaatttaaatattctctccagcaacattgagtagcctttataaagatatggagaaggtaagcagttggacactcggcttcatctaggtggatggratgaaaggtcatggggcaaggtgctgaagatattgaaaagaaaatgattgaaataatagaaaatagaataatagatcatgggagagagttacttgaaatgcagagaagaagaaaataagactatcaaatagaggataaagtgcccaaactctaataggaaacctgatagttttctctccacaaaaggcatgatcttgggtggatcagaataaagggaggtaggaccttcaagagaaacattccactgctacaatgggatgtgctaagtgatccctgacttaggtagatcacacttctcttatgattggaaaagttatgccctgacaatttaaaacttctgcatctatcctgtgtcagtgtccatcctacaagacagagtccaagatggaaatagatgggcaagagatttattggaggaaattcttgagaaggaaagtggggaaagggagcagaaataggtgggaagagtcattggaccatgatgctggtctgacacttttgaaaggagagagggaaaaaagaaagaatcaattaagaagagcctcacactgcagtgtagccagactgatgaggaaccaaagagcaaaaactggccataagcggaatctctcaatggacaggaatggcctgtctctagtgcccctgatctactcagtcattggctagagtggtgcagagagaatataatgtcaagaaactggggcacatcttgaagatgcagcagctggagatcatcagcaacaagtcctttcttgaagggagatctgagcagcacaaccccatggctgccacatccctagagaaatgccccaacttctggcttataggttcctcttcttgccccagcctgacttttgccttgcagtatattgtcaaaaacaatataattgagttatgttcttgccttctaagttatgcatatattcttctcctgtctccctagggtaaactttgtcacctcaattaggcttttatgtgtttccaaattccccatcgcattcatagacaatcttacaagcagccaaccatattcactgtatatagattttaaaagtctaaccaatttatttgccagttttatgggtcattttcttgttctaccatcactgccaacattcaccctgcaaatatgttaacattttactacattttatactttctaattttgtgcaagctaaaataatcactaaaaactttatattctattatacagcctcaaagtcaggcaccttgaaagagtagtctatcctcattctctactttctcagtttccattaatccactacagtatggattcacctccatcactccaatgaaacagtatcataatggtccccatgacctaattgacagttaartgttcgcttcttgtgtagctggagattttgacactgttgactcctcccttcttcatggcactatattctccggcctttcctactactactctgtctgttctttctcagctttccaaaatkctggtgttcctcagaggtgtgtcccagctcctttattttgactgtatgtattctctctagtcaacatcattttcatccaggatatcaaatatgtatttactgatgattcccaaaacctatatctccaaatagactcctctctagagctccagaaccaaacaccattaataatcatttggtcatttgaccatttcatagacatttgcctttagatgctacacaggtaactcaaatttagtcatttaaaaatcaaatcacacatatttgtccacatcttctcttctgttatttcctgtattggtaaatatatctacccaattgcctaaagcatataggcatatagagtaccaagtgacagtagattctctctctctctctctccccctctctcccccactccactcctcacctctctctctctctctcttcctgcctccctctctatccttgctttctaagtcaaatcaaacaccaaccctaaataattctaactgatatactcttcgccatcataactgcaattgcaataattaaggactaataatttcctgccctgtttagcacagtgtcctccaagttgacatccctagctctaggtgtgacctctgttatctccgaagtgattttcacagacaaatatcattatattactcatattctataatggttcactatcaaatagttcacatgttgctttctgtgtcccagagagccttcaacatcttacccctgaaaatatgttcaatgtcattgccctctggtctcacttttcttctctgtgctccatttgacctgaactactggcatagaagtcaccatgctcattctgacttgcccttgtgtatctgccactgcatctgccagcctggcattctcacatcccagacagattagatgattttcctcaattctcccattacttgtttcacacaccttcactgtagccagtaccattgtcctgtagttggaatgtctttctccccaccatagacaacattaattagatgcaggggttatatcttttcatcagtatatttccagagcttggtgtagtggatggcatttaagtgcctgataatatttgtatctgaatgaatacatgagtgagagtgagtgagtgaattgagtcctgaagatttttttttaatttaaagttagtatatcttctaagttattctaaaacagtccttgaagagatataggaggaaaaaaatattgtggagtaaaaaaatgctgtgggttttgggtgacaattttcttctatttactaaagtgcacagatttcattccattaggagcaacttcagaagattgtctccaactacctataatagcttcaattgtatcgcaaattcccagtgtaaatagggcatggggatgttgcaaaacattgttgttatatgcaggttttcaagcagtgctttgttgtttaaatgcaatttggcctaaaagccttaaaaamgaataacttttcttcacatagtatgctaaagtttctgaacagttttcacatgccatttttattcagtattcaaagtatctcagtgaggtagtcagaacaaaaatgatcatctttttatatatggcataggtctaagaagctaggaagcttgctcaaggttggcagtttctgtgtggtgatcctggagctggaatttaggacttctggctgctaaactcatttcttctttctatccttgtagcctccttggtatttctatgtacaggacaagtacagctcagtttgcattcctacaatgctgctcttggccctagtcagtctcaagaccatggatgttgtgggagttcttcatttcccaagtgcttttccttaacaggcttccctgctgccctagctgaggctggagctgccagctctggttattgacaccagcaaatcctttcactcaccccatatgataactattccttttgggtttatgtctaagcttcaattctgcatggttccgtcttcttggatgtaaaacatccatcgcagtaattttcttaaaaaacaaggataaactgaaattccttaattctgcaaagagagctagaatatttattgtaccattcatggaagaattctcctagcccacatttctctgcaccagactaaattcagcagcagatgtgtttggtttggatttcacagtgctttaaaaagcacttagaatttggaagactttaggcaaactatgcactcttcaaattgctgtggaccctattatgtcatttgtttacatttmtgaccctagaagatatttgagtttgcaacccctgcctgccgatattaatataccacattgggtaaaaatagcagctaatatttatcaagcatcttctatgtaccaagcactgtcttcaacattttacaaatgttagtacatttaaccctcacaacaaacgcttaacaggtaaacaactcttcctagtaagtactatttcattgttcccaaatgaggaaatcaaaggactgagaattaaggacattgcccagtcacacagtttgtggatggcagagctagattcagacccaggctgtctagatccagagccagcctctaccctctggtgcctggatgcaatttcaacttttgtgtgatccatgaaaggaaacagaaaatagatcattagcatcagaggaggtcaaagaatagtttttctaaatgaaaagagagctaaggagccttggagtaaatgaactgagaatgccatgtttgcatgtgcaacactaagcatacacctctttggacacagaagactctgagagccttatgaagatgtgcctactgcttcagtcacaaagttgaaaagggcacatggcatagagtgacctcatgaagtcgactgaatgcagtgtgtctcgttgtggtgctttgattttgcaaaaatgtaaattagtacattggcaggaacagctggctttgctctgcgttttccttcttagaaattttgctcttctttgccagcccttaatattgctcagtgacacacagaagttgaatgtgattcccaaaaaactcttagcattcaaactaggggactgttggtggtcatggaaagaaaaggggagagaaagttatcctttcttcaatatatgcctttgaaataattaggttattccttgctggcatgcaattttagaatgggaaagaagggacatgatttggatgtttgtaagtgttaaggtttgatagaacactattctaaatctggtaataatgataataatgatgatattktagctacttgattctcagagatttgttgttgagtcacraacacacatctacgaccttttctgtatgtcccactttttgatgtacagtaagagtaaggtagaaacaactcgccacttggcatttaatctccttatctttcccacttattgatctatagtaagttttttcacaaacatatgtgaccagtgtttttcattttgcgggaggcggagcggggacatggctggctgacttgggtcctatagcaaagcttggggccctagagctgccagagccaagtaagaagtagtgaccagagatrggtccatgtcctgggataggcacaataggaccccagggcttggtacaagaagcaaaagcatatttgcggtcaggccaatgttacatatcaagtccgagaccaagattgagcaatattgagtggaaaggccagaaaccacagaaaatccaaaggaagacaacatatggttgggcaagggccaaaggcagtattgcttaataaccattaagcaatgtccattaagcaaatgtccatgctttggagtcaaatttggatttctatttttcttcatattagttgtgcgaccttatgtagttttaatgcagaatgtgtaatggtcaagtactggattctgcaatctagctgtttacatttgaatcctgttttcccactaccagccatgtgatgacatgaacagattatttaattattagatgccgtaaggctggtaattatagcagaacctttcttaaartgtggatgtaaggatggagagaattaatatatgagaagcccttagcacagtaattgcacagagtaaacacaaataattattctcctcattattataatgataatctcttttgtgttcctgtttctcctccataaaataaaagtcctaacacttgcctcagaggattgtagtgaggaataaatgagataaagtgtrgcggcccctggcccgtgaacggtagtcatgattattgtaaggaacataagatagaaatttgccacggtaatctcccatgaggacagaacttcttttgaaagccccaagatcctgcccgtaaatcataaggcatgcacaccaagcccagtgtctgacagcagctcctttcctgcctgtctcatcatgttaaacgcaatatcagaaaattaaagaatagaaggggggagaaaatgtaaagtcctcaatatgagcaagtatgtagaagtccaaaaaaagtaaataatttgcacaatgtcacactgctagtttgttacaaaggtgatccttgaactcaattacttgaactccttttctgttgtctattccactattccacactaatactgcctcttctaaattctcacaatccatctggtggctcctcaggggctgatttaagctccatgaaggggcttagcttaacatcagtagagaatcagcctctcctgagaagggattcgattgctgtttgctcagtgctgattactttgataataatcagggtataaaaagaagtaatacagtattaatcaggaaaacagcatgctaccactgcagaaactaggtcatagttgcagttaactatgccatttgtaatgcaatttaatgtcaattttctcttagatatttttcttttgtaatcttttcttattttttaatttctttcatatagcatgcaaagccagttgagttgacattggtgtttaatttaacaattgttgaatgaataatttgaataattgatttgtccctgattcatttttccaaccctttacatcttcctagttctcgtatttgccaagtgactttggattttgacttgaaaaaaatttttaaagcatctggtctcatcaggtaaatttcatttcctgcacacccttcagctcccttcccttcacccactcatgcactcatacactgtctgccttccttccagggcattctgtctttcatcgaaggatttagtaccacagctaactttaaagcctaaacatgagtagttttcccagaaccatggtactgaaacctcatgattagatacaaaatatttgaaaaaataatgaaaagaaagtaaaaaagagaattgaaaaaaatgaaattgttaatgtatgaaaacatttaattctgccagctggctttttctttcttgtctattctgcacataattccagcgtgtacttcttttcacatttcaatatctctgacatcaggatacatctaaacatcaatggcttcttgcatttacaataggcattttttattagagtcatatagaaaatagatcattttataatggagtatgtcttcaatatgatgaactgtgatgatagaaatactagcaagtattgtgtgccattcattttcataaatgccttatacatgttaacttctttaaccttcacaaaacacctacagagtggattctcttattctctctgttttcagattgcagaaacaaggagagataggcagtgaaagaggttgccatatctagtaagaaagtgccatatctagtaagtaatggggtcaggatatgaacccagactccttccctaggctgtgctcttaacctctacccaaaacgtttttctgatttttccatataggactttggacacttttcccatctcttggtttgtcttttagaatattccatyatcttctgtgaagacattggaatatggattctcattctcacttatttttgtctgtgtgtctgggtattttaccagagggtcattattagagtcaggataaatgcaatatttaagagacctatctctgaaatcagaaactaactgggtccaaattctggctttgactcttactagccctgtcactttgggcaaattacctaacgttagttttcttttttaaaaaataagtatttttttaagtttacctcatagggttatcatgagaattaaatcaaatgacttatgtataacatatttagaacaatacctaaatataatgaatacccaacaaatgttggcttatttatgaaatcatagtatatgagactgaagtaaaagggaagagaatgaggaaaaaaaaacaggagaaacactcagaagagttagcaatttattaactcattcatgtattcaacaaaagatgtactgaggttgtattgtgtgcaaagcaatgtagggacagcatcttccttatagctaggtctgaagaagaaaaggaacttgcaaaatgcttctgttttctgcattgggcctggcactgagtaaaatgcgagagtgaarggtacatcaatttcgtattccccaaaagcgtcgagaggcacagagagaggtctgggttttcaaggaagggtgaaattattcccggtcacaatggatttgaagagattcatccaccaaatatttaagtgcctacaatatattgtattcaggatataaagaataaaataatagctctgctttcaagaatgatgcttccaatacttatttgtgatttagatatagaaatcggtgatgggaaaacatcactaatgaggtaggtagtcattttagttagtagagttggattcagcttattatttcaagcaaccttgctttaaattgctgccctattgatctttctggaaatagatacaaaattaccttttatttttttttttctgagatggaatctcgctttgttgcccaggctggagtgcagtggcatgatctcagctcactgcaacctctgtctcctgggttcaagcaattctccctcagcctcccgagtagctaggactataggcgcccgccaccacacccagctaatttttgcatttttagtagcaacagggttttaccactttggccaggctggtctcaaactcctgacctcaggtgatctgcccacctcggcctcccaaagtgctgggattacagaggtgagccaccatgcccagccagaaaattacttttttttaaatagagaaatgtatcactacatttaaatgtctaagttcaaattaattttgattttattagaatagaaaaactgaaatgaatatttttgtaaagactaaaaacaattgcatttatagtttaggcaattggatgtcttttggtttttgtttgtcattccgtctactgagtaatttagctaaaaataacagctcttacttggccaagaaagtcacatgtttatgttttattaagacaagcaagttcatcctcaaatatcctaatttgaattaattaaggaaaaatgactaaaaaggcatttattaaacatatagtaaggggccagatgaaacgatcaccatacccaaatcacttggtcacaaataatttttgcccattgtcaaccacatatttttgtagactgatagattttcttttcatggaaaaatcaatggaaatgtcaaaatatgttgtaaattataatgtaaaaacaaaacccctttccttttgcttatttcatccaccagatgtccctcttctcaaatttggtgatgtgttactacagaaagaagtgccatgctatgttaatgaaagaaactggtagttgagttgaaaaaatccactgtcaatctccactcttatttttggcaactacaaactgacaaaacgttagcagctatgtctaaacattctttccagacttggattccctccaaacctttcttcttgagtggctatctggcctattcttaagaactctctttaacaggaaagctactctcatccaaagcagccagtctacttctggtcagctgtgcctgttggaaaatttttttttttgctaagaaatttatctcttatatctacttccatggttcaaatatctacctttggaaatagtcatttctaatacattgttttccaaataatagtcatccaaataattcaacagctaataaattctacctacatcttttcttctccaggctaaattgtattcccaaagtttgctattagtcaatttttttgaataaagggcatattttcacataaacaaaaaattataaatggtgattggggatgtgggcaagataaaaaaattatttaacttacatcaagatgaagcagtcagaaattatctatattaaaaaattatttgtgaaaactttaataattcccaacagaggttatttaatatgttaattgtgtttggttgagtgatactacacagaaagtatcattagaagttattttcccagattcaaattgtaactctaagcatctatcacatattctaccccagtgttttggtgtaactataagtcatctaaattgtgaatgattgttttaaattattcaaaacatttttagtataaccaaatggcatttaaagtacatctgcattcttaaattattagataattctctaatctgatcattacaatttaatattcattaatctggctggatgtggttgctcatgtctaatcccagcactttgggaggccaaggcggacagatcacttgaggtcaggagtttcagaccagcctggccaagatggtagaaccctgtcactaccaaaaataaaataatttaaaaaattagctgggcatggtggcatgcacctatagtttcaactgctctggagaatctcttgaacacaggaggcagaggctacagtgagccgagatccactactgcactttagcctgggtgacagagcaagactccatctcaaaaaaacaaccattaatttgtgtgaacacagatgaacatagaaatattcgaagggaataatactatgagaataaaaattggtcatagaaccggataactattgcaaatggagattattcagtgctagtacgattgtctacacatcaagtcattatattttatttttagagttgtttgacagttcgtttaggcctgtactgagtcaatctgagaactaagtgaattttaatgacattcctcccattatatgtaatatgagtggatgggaatctcttgtaatttatagtaatgaccctcaggacacacttargtttaggcaatagtagattattatcatgcccatatgaaatagttttcagaatctcagggaaaagatgaaggggataccccgaaagcaactgactacaagttattttcactgaaaatcattatgtttatgaaaagtaacacaaattatatgttacaactatttttaagctgttctttaccaaaaagtcgaacaaatacttcttaaaagtgaaaatacagccaaatttctttattgtgttgagtctttctggaacctctaagtgtccatctggtgcttagagccacaaaattttgaagtttaaaaattccctctctctaagcattagggttgtaggaggattaaatccaaagctcattatggacaaatcccattaattggcatttttattttggtgaagtaggaacaataaaaaatttttaaacttggttcaagtggagaatggagaggaagagtatggctcacccagtctttccaaaatttaacctcaccaagcaaattgaaggaggtggcaattatacatccacagccccaaaacctcatattttgagatgtaaatttccaagtttcctgcaataatacaagcagaaaaaatattatcagtcatctgaaatatcagagccaactagactgaccatattataatttctattggcttttagagaggatatgttggaccaaatgttttgattatgtttgtggtttgaccataaattttgtgcatcgataataaatagtaatgagctaacaattaatgaccagctactccaagccaggcaaagtgctaagcacattacatgcactacatttaagcctcacacaactcctgtgatataggcaccattgttatattgatgttacagctgcataaactgtggcagagcaaggtctcttgtcaaaacttttgtgcttaacatccaagttctcgtgtcaggcgtttgtttttcacatccttcaaagcaggaaagttagtcttccatcattgagtttcacaagatgtcaggcactaggatgtacagtgcctggacaccccaggaaagatccccatgccaggagtttacacagtggcatgagagggagggaagaggcagatacccataagcaatttcagttcggataaatattgcactgagacaagcaggggaagctgtggatagattgaggaaagacagatgcctatctgagtccactcaggctgctacgatgaaatacactaaaccaagtagcttttaagcaatgaaacttgatttcttagatttctagaggctgtgaagttcatgatcaaggacccagcagatttggcgtctggtgagggctcactctctggttcataagtggtgctttccctttgcatcctcaatggtggaagggggcaaacaagccccttctctcctggcctcttttttaaggggactagtcccattcatgagggatctgccctcatgatctaatcaatccctaaaggccccacctcctaacactatcaccttgggggttaggatttcaacaagaattttgagaggacacaaacattcacacaatagcaatgcctatatacgctttcttcttcgtaactaatataaccatttcttaaaataaacaagtgagtcttaagtgcctacccatgccaggtacctacgttcagggctccacatttcctctgggccatgtctggtgagatgccagtctgcctccaagatgctcataagccacatttttacaggtctctctaaaaagcttcctatgagttttctttgtatgtaatctcataatctagtctttgaatgaacctaaagcttttttctggtccgtagctagtggaaaggaagcgttttctttgctcatttctttccatgttaattaaccataacactatccttcaagccaactaatttgttttctactttgttatttagattcttcaaatatttggtgattattatcccataatccttaagttgttgcttagttgggttacatatacttgtatttaactatccatttattttccattcttggtctatattttatttcattttgttatttttcagtattgaaattgcttttcttctcttgtcccactgaagcactgtgattcatgttaacactctgaaacaattggtcataaatccaaattcagggcacttaggttcaggaaaggcaggcttatgatcttattccagaagattatagaaaaactagatcaccaaacatcagtggtagtgacttcacagagagaaatgtagcaatttagcgaattgccctcccttctttctggattttctaattttaacttcctaggttgcattcatgcaaccatttatataactactaggtgctgratcttctcctttcttaggcattttatccaatgaagacttaagattcatgatgcagttgaggtcattcttaaaggaaataatagactttttaggttaatttaaaaatacggagagctgggagaagcaaaggaaggcaaagagagagataggattaattctggaagcgtacaggagtcatcctaaagggatataaaaaagcactataaatgttattgctctaagctcataaaggaatcctttctaaatgcgtcctactgtgactccaacttttcagtctttactcttagatcatgtacatacattaaggctctgtccaatgcaatccctagtatggttcagtattatttctgtcctttttttggggggtggttgtttttctaatcaagataattccttcctaatatgttcccttttttatacttatgactttctcttgttttagggagattttcctgtgcacacctataarcttcttttctccctccacttttgtattctgtcaactctcacccaccactgaaaccttcctagaaggaagtgaacatctgcagcccataagatctgcattcacagtctttagaattagctccaactgtcttccctaactttccaaatcttcctttttccatgtccagttcaaagccagtctccttttggaaactttgtttgattctaacagcccacataaatccttccttatacattctttttatgtatttacaaaatatacctgagacttttacatcctatgtattgattattatttttgttattgttgttttggtcttaccctcaaccaaattctaattccttgagagcatgaaacatgacttatacyatattggtattttcatatgatatctagtgcaatgctagacatatatcatatgtaaaaattgtattgacttttttactttctgtaaattgggcactctttccatagtacccagctgaagtctattggaattttgtaaatgatgaaccttaaattcaaactaaaactatcatataagtcaagtccaaatatagtatatattaaccacaatcatcacactgtacattaggtctccagaacttattcatcccataactgcaagattgtgcccttgaccaacatctccccattttccctacctcccagtccctggagtaaccactattctactcggcttgtatgagttcaacattactagattccacatgaaggtgagatcacatgttagacatatataatattataaaccttcttatgtgatatgatcaaaactgatcataggttgactacttgaattcaatcacagtagggaataataaaaatcatacaccttttagtcttattttatttagcttcaaacacataacccttgacccatcttttgcatatggatgccctagttagtgtcatattgtctttcttgtataaaacaggctcaaaatgtatcatctctaattcatttttggtttctttaaaatggagtgagaacacaaagatacaataagtaccgagtcctttaataattttataacttttcctagtctattacaattgtcttacctaaatctaattcgataatttttttaagccgggcatggtgactcacgcctgtaatcccagcactttgggaggccgaggtgggtggatcacccacggttaggagtttgagacgagcctggccaacatgatgaaaccctgcctctactgaaaacacaaaaattagctgggcgtggtggcagacacctgtaaacccagctactcgggaggctgaggcaggagaatcacttgaacctgggaggcaggtgttgcagtgagccgagattgtgccattgcgctccagcctgggcaacaagagtgaaactctctctcaaaaaaaaaaaaaaaaaaaaaaaattttcagcaacatttatgtctcaaatctttcaaagctctcaacttaattttcatagaaataacaacaatccacttttggtaatcatattagtcattctatataacagttcttaaattacatcaattacaataacaaagataattagcataaacaggtttggaaacatctactgacttttagtaaacagacaactactcggcgcagaatcatacagtcttactaggagttaatccacttgtcagcaggcctcggcaagctctgaacttcattccatatatcttacagagcaattggagagttcattaaagtgcacttaactatgaagataggttaccttctatggttgtgtaatattaatattgtaatttaagatgtttatgttcaggtccagagagccttagcacacaataaatatttgataaatattagccatttacatttcatgagaaagttaaacatttttaaatgttttcagttcataaagacttttgtagcctgtttaatttgcaatcgacatttctgggataagaggaaccataaccagagagcataaagactaacagtggtgagacygcagaagtcaaagtctagtttattccttctattcattattttaacaaatcaacacatccttttttcagtggctgctctttgccagcctctgttctcagtgtgacaaagtcaattatacaaagacagacaattgtcacttgtcacttttttgtacaagtatgtctttgttttttcattttgtgggtgatttatttcaactcctggagtaaaatacttttccaaacttgattagaacaagcttcttaagatatctaagtagtgcctatctgcacaaaatgttctagaattatttctagctcttcaaattaaatatgctgagagaacaatggtgttataaggcagaagaactagatttcaagcaaaacagttttaaatgtcttgctgtggtaggccaaaaaatggtgycccaaaagatatccatgccaaatctctggaatctgtgactattatcttattttggaagatgaatctttgcagatgtgattaagactcttgacatgaagaggtcacactgagcaatcctggaaagctctcaatccaatgacaagtgtgtttctaagagaaatacagaggtagatttgaacagacagaagacaagacacaagaaggaggcaatgtgaccacagaggcaaaggttagagtgaaatggtcacaagtcaaacaatgccaacagctgccagaagttggaagaggcaaagaacagattctccatttttggggggaggaagcgcagccctgcaacattttgatttcagactctggcctccaaaactgtgtgagaataaatttcctttgttttaagccacctattttgtggtaacttcttacagcagccacaggaaaccaacatgcatgtcataaataaatgtactaagtatctaacagctcatctttatgctgggaacaacccaagatgaagcatagagcaggtatttgggatgtcactaaacaaacagttccaaaagaacagtatttgaggaattcaataattctacagatctgattatactcattataatctgttgtgttgcttacagagaattatagggaaaaggtaaaatatagtaatctaaaaaacaaaattcacaagtcatgcataaaaagtcatagcagttgggcatacgtacatttttgtttccataggaattgctttgtagggctttttaagaggaaatatggctgtaaattacttcagggaatatattaacattgttatttgaaaaaatcttttgtaaaattaaatttgaagatatgggacctggtgctgatattacctaaaggaaattgacaatgctaatagaccaccatggagataacaatgggaaggcttatccacaaggtattagtaaattgttttctaagtaccatgtgcccattcatatattctcattatgaaaataataattgggttttgaatttacagtgaaaactaataccatgagaaattaaatgaaaaaataaaggctattgcattttgtattagaaatctctattagatttaggaaaatgatgtctttacttttattcagcttaaataaaatatttgagacattgaatatttttaaaagtattattctactaggtaaagtcagacttaatgtttacttttgttctgtaagttattttcaattcctatgaaaaaagttttcttactttacaatattaaacatattgtgtgcaatcacatcagttttcagctattttttatggactctggaactcagagggagtcaggttgtgagacttaagttctagaaatagtaaccattcatttctggaaaatcactcaacagagttgagagaacaagctgagaagtgcaggatttccggtctgtaatgcaaatgaaaaaaaataagaaatgtggaaaactatgcaacacctctttgggaaattggagtgcccacactacactgataaatttaaaatcaaatcttttcatttagcataccgagaagctgtattttactttcttgctgattcacaggtgattcaggataaagctggctgttgctatttatgctttgcaatttttttgttgggggggtaagggtagagtggagtctgattctaatgcctctaatagtagtatgagctggaatggaatttctgaccatatggcttttctggggcagggaaaaggtttagtgcaggaaattctcctggaccaactcaagacttagttactgacagtgcagaagaacttggttgcagggctgttttatctccgagataagcccagttttagacaaaaaaaaaaaaaaaaaagccataaaaactcaagacagaaagacagttggtcttaccacattgataatattggttgtgaatggcacggtgacttcatagtatctctagtgaacctggcccctgttgtgataattttgttggaagagactattctggaatgccctttatcttacctccttgcaattcagtgagatgtattaatgtgctcaaatggagacacaaagataactcctacccctccccatagggtcccagacctttcgacatagtgagaaatttgcagtaaatgtgttctatggctttcttaagatgattcatttttaaccctctcatgtgcttttattcccagttgttcactctcttaaacctctgccctgtgctgggaaaggtcaagttaaaaaagcgatctagctattatagaatcagaaaccccaaaattaatctacttagctcaaaagtggctgtgataggctaaataatggccccacaaagatgtccacatcctagttcctgggaactgcgaatgtgttgctttacatggcaaaggactgcagatggaactgtggttactaatcagctgaccttgacatagaagctgatcctggatttctggacccaaagcaatcacaagggaccttaaaagtgggagaaaaagacaggagaggacgtcagaataatgcagtgtgagcagaacatagcawggctattctggctttggagatggaagaatggggccacaagacaagaaacacgataacctgtagaagctggaatgaggaaaaaaaacactagattccccctccagaacctccagaaaggaayatggccccagtgatactttgattttagcctagtaagaccgtgtcagatttctgacctacagagctataagttatatctgtattaattaagccaatcaggttgaggtaattcattatggcaatgataggaaattaatacagtggcaatcaggaataatcacagaatcagaatccagcggcagacagttacttaattcatgttttgaaatccaaaaacatggtgacatttatagggaagtagtcaggccaagaagagggtattaatgtttcaggacagcataggcactttggttttgaacgactagtagttttatctggttctaagaaagaaattttaaactcaaataagagtaccaaccagtatcctggctccacaggaggagagaagcgaagctctatacctggcccgcatgtgaayacaagcagccagttaccaaaagggggagcccagaagcacacaatagccaggttctgttggatttatcacaaagttggtaatccactaataatttcttttacttgctctctatgggtgttcttacaccattaaaacaaagggtagttgcagaccatatggataatgtttcatagaatgttttatcctccttaactttaattaactaaaccaatgctgacacaattacactggatataataatagtttttaaatagtctgtataacttcacaaatgaagcatatgctgcaactacagaagaaaatgttgcagttgcacatttctaagatttttcccttaattttaagtaatataagtcatctgagttgtagtaatgctgttcaaatggtcaatgatgtattggacacttttaacacacacacacacacacacacatatccagaataaagaggaaaaaaatgactgagatgggatattagttcagtggctttacttcattttcctacaaaaatttgtcctggcaggcagaccaggtaggtgggatagttctgatctatgagtttatccagagacccatgttgtctttctagcagctctattatgttttagggaataacccttttccacatggttcagcatcacaacattcacattttagtttatagataaagaaaagaagtggacagcaaacagcttctgtttgaggtatgcaggaaggtgtatgcawgacctcagtaaacatctcattagccggaatttagttacatagccatagcaagctgcaagggactcagggaagtgtaatctacagatttgtgtccatatgttcagtggacacttggaagattctactagttaacaaaaaatagaggattaattagcaatctsggtccacagagctagaacaatccccgttagtcaaaccagattggtcctaggcctttgtaggtgtatcytcccctggcttctgctacaattttcctaattttgattcatttctagrtgcccatttactgtccttgtacttcactctatgtctgtgtttgctcatggtagcttcactagcctttgctaccagyttataatctttttcttcactatgttcctgtgatatcatttttatttatttttgtttccagttatatgcctccgccatattctgaatttaagtgttctttcccagccaaccaaataacctgaaattccaaatagcccagattcttctctttcactcccaaatagtctcaatcaatgacctgtgatgcaaatcatctttatgctgacagcagacaagagctttctcctttgtcaagatgcattaggaaagaatgacatcagcaggtcttatgttttagtgttattgacctttagagtagataaaactaatgctaaacagttagtagccctacttaagcaaattggattgctttgagaccaaatccatgttagactgtaaatatgcaacctcattcatgaaaacacatctatcctaatgtagtgaggtgggcgagtcttgaggactcaaccctcaatacattatttattgtcaatwtccttaagatgctttgtggcatttggaaatttttgtttgttttgtaaagaaatgcggagaaaatgagatccagtcttcaggatcaaagacaagacaagacatttcaggtcaatagctctctctgtagtaatggtcagcaaaagaaatgcataaattgaacttatggtggggaaatcataatattccactgtaatattgtgaaatatgtatgtggtctttgtcctcatttcctggcatacaactcataagatccttagaatcttcagagtgacaagtatcttttgtatgctaatgagttgactgaaggctggcaacctactggtagctcaggatctgggctggtcacccaggaaaccaaggcaggattagaggattgggactttcagccccaatcttcaacctcaaggaaaggaagggatctgaaggttatgttgatcaccaatgggcaatgacttaatcatcatgcctttgtaatgaagcctccatgaaaacccaaaaaggagtaggcttccrgaaagctgaacatgtggaggtttctagagggtggcatacccagagagggcatgaaacctcagcactgctttccatatgtctcaccctatacatcttttcatctgtatcctttgtaataccttttataataaacaagtaaacatgtttccctgagttccgagagctgctttagaattgatttcttgcttgatgtgtggaggacaacccccacatatcttgtgtcagaagcatgttgtaagaatgtrgtagaagaaattgtttgtttgttattactgtattctcagatccactgaattgaatatttcttttctgtcagactagctgattagtgcttatcaaggcagccaaatggtctcagcagcatgaaatataagaaatagaaaagcacttacagattatatagctcagcatctttcatttcactgactaaaagccacatccatggatgtgaggaaattttcagctgggaaagccaaaagtggaaccagatgtggatgctcaatgcagtgtacagtatcttgggtttctattgggtctacatttatacccacaatttcttttatctctgcttgccttttttttaagccttttgttcccaattgtattctggcttcattgaccttaacagacttcttatttggagtattatgctttatacatttatataccttaaatattgcaaaatattttaaataagataatttttctttagagaacttatagtttagtgataaaatatattacatgtataatcagcaagataaatgtttacatagaggtttattcaattaattatatattgaacacatactgtcattgagaccagaatggtcaataacattctctgaatgtgtaggctgtgtaagcatataactggggaaaacagtctgagaggttaagaaaagcttccctgataaagtagcagctggtgaaatctgaagggtgaataagagatagccaagcaaagagtgggagtgggagtgaggagtgagagtggagatccagagagacttcaggctgaagaaatagcatgtaccaaggtcctgaggcagcaaggagcatgcactttcaaggtcagtgtgagttgaacatagtgatcctaatggaagaagggcaggagagtgatgagaaggggctagattacatggggtatggttgatcatgttaaggttttggactttagtccaaaacaattttttgatttgtggtgatatgtcctatttctgcagaagtgcagcaaaattatytaagcttcccagagagggtaaagaaaacatttgtagaaggtgtaatgtatgcattcagatttaaaggaaaaatagggcgtttccaggcaggcagatgaagcaagagcacaccagtccgagaaaaaaaaaaaaaacacatgtcttgagatactgccattagaattgttcccagttcataagcagagaggaaaagatgagatagctctggtaggcagggaccaactcatacatgccattcaagggtgcctggattctatcctgtaggtgatgagaaaccgctgaggttatctgagctagtgaatgacatcaccaggttcaagtattagtggagtccttctgcagcaatgtggaagacaggctacagacaggatggccagtgcaatgggcatcccaataggaaagagaagatattggccaaatctgtgggagcagtagtggaaaggggaaaaaggggacaagtatgagggagagcttgttaacagaagtatgactttatgaaccagaatggccacctctgcaaaatgttagctaagtaggagtttactgagctaccgtttcaatgaaataagtgtactggggagagtaaaataaaaatgaaaatatctgggctcactttccccaacaattaatccacttatgtttataatgaaatgtttattttattaaaattgatattcattttgacacatctgaaatttgaagaaaaatcaagagtcaaggttttacttttctagcatgaaagcttggaactagaagttaatatttgtcttcagtacctagagagactattaaagtagagaaacatgtgtgctctaccagttttctttaccatgtgctcaatactttagagtcagtttttaatcagtgttcatggaatacatgagtagcttggctggcagtgtaacaatatctcatgatgatattgaatactcaccagccactttctatgtacttaataggtattcaggccatatctctctgctcagtcaccatcagttattaaatggaacatagagtacacaggaattatacctgaaactgctgaaaccctatttgaatcctaatcatgatctactataaataataatattatactataagtgaatttatagtaatcccttagcactaattacaaattactcaacactaattataagtaagcaattgcctgacctctcaaatagcaattttaagtatacaaagggcatttatgcatatagtctcttttaatcataaaagcaatctcaaaaggtaggcagaaacctacaataccttcttaattaattatttttaattattttcctcttactttgttcctgagtctgaaaagttgaagagamgtacttatttatctcacaagtttttatgggagctattatcccattttacagaagagaaagtccacttgggagaggttaaawgtctttcttaagagcatacagtggtgtaagaaggggtaagtatcaaacccaagtctttgattgtaagtcaatgctcttttcattaaatcatccccacaactaatcgtagacatattgtttgactctaatgtaactttgagcatcaactacttccaataagagatgctagaaaaatattctctagccaggaaggcaaatgatcaggatgccttatctgtagaatgataaatactgcctcctagaataacaatatgatttttctccttaaaaatgctctttttgagagaattactctgaaagattacctggaagtaacttccttctactattcaataattacatattgagtgcctgctgtgtcctaggcatgattctaaccatggaataaaacagttaataacattctcatcatttgaactctagtagtttgaaccactaaaataatgaaatatgaaatattgaagtgaatattatgaatatatttcaacatgagataatgaaagcagtttctctactggatgccaacaccaaactcatttgagaaagtgagccaattttgcattttgcgttaaccatgttatttgaacagcctgacaaaattgaacaagggagatctcaaatgtggaaactttcatttaggtggtctaagaaatgtggggatgtgcagtggcagacagctcacaacattgtcattcatgaggctttgctatacagatatacaagcttgtcaccataaatatggagcaaaagcacacagccctgtaaaaaataaaaacttaaaatgaataaaacattttttaaagattacataagcaaaatgtaaatagatttatctctagaaataagtttcagaaatgctgtatggttgccatattctaaaggtactatgtgtcccataataacagcaaaggtgtctctggtgccccagtgctaagcgatattttcagttaactgtagcccaagcccaggaggctgttatctatggcaaaackcaaagttcctgttccctacaaatgtgccagggcagattcagaaatcaataactgtctgaatatctagaaagcccactgatagagtcagagccaagatcattgtaggcccttttaaaagtgtgataaaatgcctggctggggctgccttttgaagaagaattgcatgggagggaatgagcagcccagaaaaacttgaagttctttatgtattcaatacatgtcatctggggccttttcagggactattacagatgtcacacttagatccaccaggagtctttcatcaggttgccacatacaaggtgagcttcccgcttgtcagcttcgatccaaaccattgcaatatgcaggcaagatgaagaattgtttgtacccascaattgaggcttatggtgggatttaagtctctgaggaacaacagtgatcggagtgagactactatgtcttcattaatctcacaagtcatcctcctctgttctttaccttaaattgttgcrctccagctcccattcccaggctgtttctcatttgctcccatgagttcaagctcacctttacactgatgtcttccagcaacttttctccagcccacctggctgtctaacaagcacaaaactaatcaaacactgaattcatcacctccatttttacccccacccaccactccagcctacctgttcctgcccctcttgttayagtctcaacaaatgacaggagccaagacccacctttccaacctagaaatctgagtggcaacctctatgctttcttatccctcactaccatattgaatccatcaccatgtcctgcttcttttcctgctacttatctctaaagtccatctcccctcaaagtccctgcctcatatggttaggatatttgttccctccaaatctcatgttgaaatgtgatccccagtgttggaggtgaggtctggtgggaggtgtttgggtcatgggggcagattcctcatgaatggcttggtgccctgcccatggtaatgagttcttgctctgatagttcaaaatagttcagatagtttctgaatctgccstggcacatttgtagggaacaggaaccttgtgttagttgtctaaaggagcctggcatctcctccactctctcttgctcccactctcaccaagtagcatgcctgctcccccttcacctcccaccatgagtagaagctttctgagtactcaccagaagcccagtcaatgctggtccatgcttgtacagcctgcagaacatcagccaaatctcttttctttataaattacccagtctcaggtattcctttgtggccacacaaaatggactaacacacygcccatgttctgttctcaacatgatccctgggactgttgtgatatcctcttggttcctatccccaccccagttttctcctcttagaccacctcttaaccattctaatataaatgtaaatctaaccatgtcacctgcaagtaagatgcaagtgaatgtctagtcccatttcctgctattccccactaagcactcaccaccctatcacatcaaatgacttgaatttctccaaatgtatcatgttctctctagttccctttacctgaaatgccctttatccataatattttaaaattaagatagcatttaaaaatcagaagattgyacatttttaaaaacctgaatgttgaccttctcttggaaaaaaactgatctagcagcatagagcctgcttccccatacagcaaaaattgggcagagctttggggcagcaggcccaagccctactctacttacatacttgtctagccaccaaaggtatttaaatttacaatccctgacccagagaaatgcaaaagctcacaaaatcatttgttaatgcatcacagagcgtccagcatatggagcgacaggaacactatgccataaatgaatagtgctgctttagtgatcaggaaattcttctctgttattcttacctattctagacattgagagtaacaaatttgctatgataaagttatatctatttagaccctgaaagagaacactgaaatggggaaagcgattttgtttcagaatgtgaacattaaaactagacctgttggtgagtaaaaattggagctccaggctttaatataattagagtgctacaagaagaacccctcagttcaagcggcaagctctatgttggcagactttctgaccttaagaaaggctttaagatatctaggaggagtaatgaggatgagtcagaggctataaatatgacttgagataggaaaggctttcttaggaaatgagaaagctttatgtggctacatgcaggtgagccagaaggcaggcctgaaatgatagcttgccatctgtcctcatgtgcttgctcttcagaacaccagccaaaacgaaaatggtaacacttgtgtgggctgctctattttgtagcatttgtaacaacagaacacttcacccagaatgaagccagcacattccatgggtgattagatgggttggacccctgattttctctgattatgtcttctccacctgctggctgattgaatcacctttcaattttcttaccagcctggctcctcatttacacagaatgccaaaatgatatttgaagagcttaactgagcctttacctaggctattgattgatgattatgactgctagtatagtaagactgctgggttcaaaatagtgaagtagtaccttctgataaattgccaatgaagtgattttaacctaactcctaccaccaaattcacaaatgaaaatgaatactcaattaatagattgaacatttattctttgcaacataatatgagtttttttgttgttcaatcaaggaaataataggggtaaaagtgtaaactctctttgttcaaattcctactcactaatgttctaaggaactcaagcatgttatgtaagctctctgtgccacagtttcctcatctgtaaaatgggaataataacagctccttcttgtgttgagttgtcatgaggatttaaagagctaatacaataaagtcttttaagagtggcacatatattggctattatcaacactgtatatgtcaggcattgtgctaggtactgaatattcgttggtaaataaaataggtagagtccttcccttcatggaccttagactagtggctggctataaaaagtgtaagatatttcatagctgctttgattcaacaatttcaggcaggtcatttgcatgcatagagaactcagagccctgattagcagctgctccttttttctctggcaaagagatcatatccctgcccaaagatatcctccagcagaagcacaaagtgttgacagccttgtcaggtgactgtgtttccgatgcagaggtgctggtttggcaatggtgttgtccatcacttttatagcttaaaatataatgaaagctgcttgagcaaccttgctagattgtactattgttcatgcatattaattgccctttcctagaagaatactgatgacagactttgccatgtgactttggtcacaaaacggtagtggattgacatttgtcatttccaggcaggagctttaacagccaaggcacagctaaccatactcctttgccctgccttttatgtatttatttyaagtatttattgagtgcctattatggcagcatgtcaaggtggagcctccctcagactggggcagtgagcagaactccctgtggacatggagtgcgtgagtgagaaatatccttttattgtaaaggctactaagactttgagatcatttcttaatgcagcataatctattttattttaactcacacatcagaaacaggtaaatctggttgctttgatggccacaaaacatcaacaaatacatcaatatttctaccccaggccctaatactgccgcaggagcacgcttttttgtttgttttatgtccttggtggatcaggtcttgctgttcccttggagggaatgcagagtaggagaatgagtgctggacctagagccaaactctaagacccaactctcccattatttagcttcattatattcagcaaatcaattaatcaattggagcctcaatcttatttggtaaaacaggaagagtaacaccaaagtatctgctcaatgtatcccaaattgttcttaggaagcaccttataaagcttgatactaatgtagaaaatcatttctagttcttataacctcatagaaagtccttactttctatgcacctatgagatcctcagccaacaccattgattgactgacagacatgactgcaaaaggcaagaccaacctccttagaaggttagtctgtgagtgggaggtcaaagttctcaactggtatatccctaattgaaaaacacttctcagtccaaaagtgccatgcagagagaagagacttgatgataacatcccttggtttttcaaaggacgcattttcttatggcaaataatactacaatagtcttttaactgcattgtctcagggagaaaaacttagatcccaccatcaatgaacacagaattctgatataaaagtacataaataaatgtatttattcccaagttatattcacagatgcttcatcatctcacacrgtggtttgcaatagcctgagcatctttcccagcctagaaatcccagggcaaagcagggtcagggtcagtaagaatgtccttccttactattcttcctcaagtagaccgcttttcaatcttccttccaggaaatcttactggacagcattatttatttatttatttatttatttatttatttctctttccttccttccttcctctttccttctttccttctttccttcaattttcaagtattcattgaatgcctattatgtgccactgttctagacactgagatatggaatagacaagttactgcccacatggagcttacctgtctgaggggaactgatgtttcatgtgtccatagttccctatgcatgtctccatcacagtccacagtctctgtggactatattcataggtttagagtacaagatccttgaaaatatgaaagaagcatctctcattagactttgtatccccggcaccttgcctgytgcctggaatatagaaggtttgcagtaaatgtttatttcaaatgagtaaatatcatgaattagaagacctggctttcatgttgagtcccccgccccacaaatgtgagaaataaaggatttagtcacacgacactatcaacattaagtggtttattctgagaaatttataacaagacaagttgttttaggtgctgctttgcatttgttggcagacatagaggaatcagagttcgaatacattcagaaagctaaccacattcttctagctaataagaatcgatatgaatcactgcatataatatgcataagaaagtactacatactgagaaataataacatggccaagggtaagcctgggaatgactatggccagctgagtaacctctctgccttcctacagcctgtggtttatgagtcttgtggaaatgtgcaaagagaaaaatgaagccaaaatgcatctaattctctttccatttaaagatattttcttctcccacttaccccattcccaagagagggctacttagatgtaatctttgaatattgcaggagttagtataactatatgtggactgaagaatgtgttttttctgtaagacaatattagttcaggggctgaagaaccaaaacgacaagtgagaagttcccaaaggacaaaggagcagatcaargggcaagaaaaggaatgtggagacaaatttctgaggcttattatgtccttaacactgtgtttaaytactaaaggggacaagacagttttatttatcaaatctatttattagatactgttacagactgaatatgtatgtccctcagaatgtcatatgttgaaacctaatccccaatgtagggactttggtaggtgatcaagtcatgagagcagaaccttcatgaccgggattagcgcccttatgaaagaaattctgggccaggcatggtggctcacgcctgtaatcccaacactttgggaggttgaggcagacagatcacttgaagtcaggagttcaagtgagactggccaacatggtgaaacccgtctctactaaaaacacaaaaaattagctgggtgtagtggtgggcgcctgtagtcccagctactcgggaggctgagacaggagaattgcttgaacccaggaggaggtggaggttgcagtgagccgagactgtgccactgcactccagcctggacaacagagcaagactccatctcaaaaaaaaaaaaaaaaaaaaaaaaaagccaggtgtggtggcaggcacctataatcccatctactcaggaggctgagccaggagaattgcttgaacctggaagaaaaaggttgcagtgagccgagatcatgccactgccctccagcctgggtaacatagtgagactctgtcaaaaagaaaaaaaaaaagaaagaaagaaagaaagaaaaaagaaaagatattctggagagctcccttaccccctccactgtgtgaggacccagcaagaagacaactgtctatgaacgaggaactgggcctttaccaaacactgactctaccagcactttgatctagatcttccagcttccagaactctgagaaataaatttctgttatttttaagccactcagtctagagcagtttgttatatcagtccaaaatgatcaagacggatacctactattcatttattaagtacctgctatgtgctagacactatcctagcagctggagagacatgggccctgccccactgtaacttatattccagtgaggaaaacagaaaataaacaactaaacctgtaaataaggtgattatagatcatgataaatgccatgaaggtgatattagagggccatgcccaagaaagtatctggggaggggatagtgctagctgaggtttggctgtaagaaaaggtgtcctgtggagctaacatctgaatccaagtctgaaccataagaaggagcccactgtaaatggcttcaagtggaagaacattctaggagggtggaagagcaaggccaaaacccctgaggcaggtgcaggtttggcatgttcacaggacagaaagcaggccagtgtcactgggaggcagtgattaaagggtagaggaggagggatcagatccaatagagccttgaggatgaggcaaggattttagattttcttctggagctagtaaaagtcactggagagtcttggcagagtattgacattatccggagcaaaggactagtgaacgccatacatgtkttgcagccagtcctatctcagagtattcatgtcattagtttctgttgaatatattttcaaataaaaatcaaagcacatggattgacaagtttacacgtgcttctagggtgaccaggacagaatattttagattagaactgtttggggaaaaccttgtctctaattgtgcctagctgtatgcatcctgtcatggggctggattcttggttctatatgatttatagcaagtgtttcctaagtgctattgagtagcaatttcaaggagttcccagaaggggttgggagcagataaggcagcagtgctcattagcacaagttgtgctcagcatgagccccatctctgtcactgggccgcaatgagatgggtgtaaatgcccagcccttcccaccctcttctcacctttcccactatcaccgttccatttgcacctcactgcttctctccacaccctattagcactattccatttcyggattaattggaggaaaggtgttaacaaaatttcagctttcttctcagtaayaatctaggattttgataacactgatatttctcttgctttcctacccctccctatcctccttctttctctcccttcttctttccctctctccattcctccttctmtagcagaggctcactcagaactccagaaagtcttatattaaaaatgtttaaaatcccctgtcatagagaaatttagtttctgaaaagatcaataatcaatttatatgaatcatgagatgaagacttataaaagcttaaaaatatgttataaaaagagttgtgatatgttttctagcccaaaaayagcaggattgctacaataccagctgtaacgtgggagccactttgccttaygttgttattttatatccattgcttcttcccccaatttattgaagacttttttcataccaggcacagtgctagataactgagggcgatataagatggtaaagacacacttcctgccctttagaagtaaacatccaatgaggcgacagggagcccacaagggagcaccgtgcaacagagtctgtaacaaggatattagagaggtaacactgaggaatgagtgggagagtaattccaacccaggccttgaggaggtctaatagagggaaagggatttgagaaaagaccagatgactccatctctaaatgctttaaggcaggcccaggcctcttttctccattagcactaaatccacattttgggtggtagrgggctgattctggctctgtggtatcaagaggtatgtgtttggatttggatgcagtttgcacatgcagcaggattgtgtagtgattgtgagtgggcactcttgggccaggctgtctggattgcaatcctgcctccgtcacttactctgtaagtgaattttgacaagtaacttaacatttatttatttttttattttttatttttatttttttgagactagaatcttgctctgtcgcccaggctggagtgtagtggcgctatcttggctcactgcaacctccacctcctgggttcaagcgattctcttgcctcagcctcccgagtagttgggactacaggcccaccacgcctggctaatttttgtatttttagtacagacagggtttcaccatattggccaggctggtctcgaactccggaccttgtgatccacccccttcagcctcccaaagtgctgggattacaggcgtgagccaacgcgccyagcctaacttaagatttctactcagctttcttgactgtacatggagcaacgatattgcctacctagcagggttactgtgaggagtatgtaaagcacttagaatagtccatgaaatcttaataagcacttaagatgttcatgattgttaattctagcaagcccactgtcaaagcagtatgtgagagtcagctttgtttagtcccgaaggaatggtgatttttttcatctttactcttacacagatatccctccgcccccrccaaccccatcccgacaaaggcatagccaaatatttgctctctagcactggaaggataaggaaagcaacacgaaccagcagctgacaccaccagacacactgtggcttctccctgtacaggcaactactaaaatcagggtcattcaagagaatgctgatccatttgggaaccaagcattgtctgtaatccaggctgaaatgtaggtgggatggtattttcacatgtatgttaatgcccttttgagacaatcaaatacaattttatttaattccttcacagtagcctttagctaccatggtttcttgatggagatgacaaattttatagtatgattatttcttacatttwaaaaaaaaattaaaggattgtcctgctcaaaattatgtattccwctgattgaaaaagtatttgtttctacttgagaagcatttaccaaaaaagaaaagtatttgttaagtgattactatatggtaggtgccatgctaggctttaaggacataagagcgaatacaatacagcccctctattaaaaggtttataattacgcaactacaacacagcatgctgagctgctgtgtaaggactaagcgatgttccaaggacacagaagaagagcgcctaacctggggcggtttcccaataagtctgtctaamgttgggacctctggcccagagtagtgtatcaatgctaagggttctgtgaaccgttgttgaggaaggaggggtttcttttcccaggctgagaagaaccctgactcataccttccccttgtgtctccctcactgctcaattgccaccactacttgcccctcctcagagcctcactacccaccactatggccccttagacagttgaagtagggcccacaggccgagtagcacatcccgcttacaagacccaggagcagcccctttctatctagttcggccctcactggccctctcttggctgctgctggccctgccttcctgcctctgaatcctccgtgtgctcctaactctctcagacaaggacctgkcccytggcaggcagctgccacctccctaagcaaggtcagccctttgttctcttccagagaactaggccatctttcttgctgccccacactgcaggaactgyaaggaagggagagggagctccaagctaagccaagagagttaggagaggaacataataagtacaagttgttaaaaaacaaaacaaaacaaaaaaaacacacagtaacaaaaaataagtgtagggcactctgggaatatagaggaggagctgataattctgacactgtttcagaattcgattcagggcagttttacttctaatcacttgctctactttccatgagatacagtggtcagctaggctggatgcttccatgtcacttgacagcagtgtccaggtttctacagagcagatatttctgtcactgctctgcygtactgtgggtcaatgtgtttcaggagcctgccatcctttctttgatcaatctcttttgtttcactcttattctagtttaactaaaaggcagtcttaaactgctgggtaatcttgtagaaccagtcgtgttatttcagaaagaaaaacgacaactctgtgtgtgtgtgtgtgtgtgtgtgtgtgtgtgtgtgtgtgtgtgtgtgtgtcagagagagagacagcaagagagaagagaaaagagagagagagaactttgtgttgctgagggaaaggcaaagaaagcaaaacttaagggaaaaggagataagcccccaaaatgtttggtttcacttgactttttttttaattgggctttagaggaaagggttctacccaaggatgagaaatgcacacccaaaaaaaggtctgaaaaaggattatgccctatgaccttaattttattaacattacgctctaatctaccaataaattaagagatgagaggacatttcaataaattatggtcgtatgaagtccatgtcttttccatagcggcaactttctacaggctaaaagagcattttaaaatgctttctgttggatgcatttattggcaaccctgccttgatattgatggatagagtgatttaatttccttcctctgcattcattcaaatcctgcctggaaggtgggaggagttatttatataaatgtgagctgggagggagacggctccatggcttgccatctaatttcatgcagaatcctggcacctcttgctgcttccccaccatgtgtctgataccagagacacaaaattatgaataaatgaataattggctgagcctctacagggcatgacacatgtttttcatgaatattataattattattttttatttgagagaaaattaaacctgagttctggcattaatttccactgtcttcctctggcagcacaaattatttgtttctacaaatgcagaaaaacgtagctctctgtggtatgttttgcaagcctaatccattttctagggaaatccttgctgtctgctgttgttaccattcacttgtatggattccaattgataattccagactgttcaggttttataccactttctgtgttctctgttctccatgttaggttaaagtgtcatatgttcaatacagcctttcctttgcattttctgcracatccaacaccatgccttgtatacagtgatgctcattaaatgcttattaaataggtgagaacttcctggaatgttaaggttgatctttctaccagcatttggaattctacacattaaccacagaaatcaaacatgtcaacaaatacttccctcacttaataaatacataggtttcggccgggcgtggtggctcatgcctgtaatcccagcactttgggaggccgaggcaggcagatcatgaggtcaggagatcaagaccatcctggctaacacagtgaaacaccatctgtactaaaaatacaaaaaattaggcaggcgtggtggcgggcgcctgtagtcccagctacttgggaggctgaggcaggagaatggcgtgaacccaggaggcggagcttgcagtggtgagccgagatcgttccactgcactccagcctgggcgacagagtgagactccatctcaaaaaaataaatacatacgtacatacatacatacataggtttctccccacgctctccctcacagagtaagctccagctgcactagcctttctgctagttcttaagcacgccaaacttattcctgcctgaggtcaaggcaataaaagagtgatcgcagccgggcacagtggctcacacctgtaatcccagcactttgagaggccggagtgggcagatcacaaggtcaggagttcgagaccagcctggccaaagtggttaaacctcatctctactaaaaatacaaaaaaattagctgggcgtggtggtgtgtgcctgtaatcccagctactcaggaggctgaggcaggagaatcacttgtacccgggaggcggaagtttcagtgagccaagattgtgccactgcactccagcctgggggacagagtgaaactctgtcctaaaaaaaaaaaaaaaaaaaaaaaaaagcagtgatccctttcaacatgttttgcatttatatgggcaatattgacaaatgtatctcttgaaagaagcacatctcctttcttggaggacatcgtcctatatggacaaccagtctagtattttttcttcattaatctttttgcattcacatttactttggagagctaaagaaaaatttattttgacccttgttaaaacagtaagaaaaactttattcaggactactgcatttgatgtcaagacaattgtgaaagatgagagaaattgtgcttaactctgaatacaacaaagagagttgaggacttayacccagcaaggagagtgaagggtcagtgaatagtaaattactaagaggagataggaaaagtggagtggtgtgattcttgctaaaacaacaggactcttgctgaaggcaggctaaggactcaaaggtaaagaatgaggaacttgatcagaaaatgaaagtgatragataccaagtggggattctctctaaactggcttaacaggattcttgctgaaactcctcttgcctggccaaaggcagagcccaaggatgagacctcattgaaaaaacagtggctgggcgcagtggctcacgcctgtaatcccagcactttgggaggccaagatgtgcagatcacgagctcaggagatcgagaccaccctggctaacatggtgaaactccgtcgctactaaaaatacaaaaaattagccaggcgtggtggcgggcgcctgtagtcccaagtactcgggaggctgargcaggagaatggcgtgaactcgggaagcggagcttgcagtgagccgagatcgcgccactgcactcactccagcctgggcgacagagtgagactccatctcaccaaaaaaagaaaaaagaaaaaagagytcaggggagcctgtctgaagttttatcaagaagagagtctctgttaggaatcactctcagtcttttcccagactattgagtatcattttctgccaagacaatagaacagagtggtgtctagtgattatttttaagcaagtcattattatggattaaattataaatgccaagccttgttgttgatgtatgcataaataaactcacccctccatacatttctgcgcacagccagtatgctttcataaaaaatgttacatttctttcatattatttcaacctatttctaatattctttatcccaaatataaatatagctttttattctttctttaaattttttggcttaaggtttcaaaaaatagttgatcttttctcacatttcataaaattagattgtcataattgaagaacttctcttcatagctgtagtttagactgaacacagaaaatatctttacattattctatgatgtagaaagtgtacacatttatattattggacaatttaatgccattgtacaaataagtttgaccaaaagcaatgcataaagaggcaatgtgtattctcggccatcctccctttctgagtctctgtattctgttccttccaggattccacccarttcttccattctatgtccaaattacccttgatcttcccaaactgctttttctttaaaatcctcttctagatatcatgaagaccaaaacacctgaataaagagatttccatgagagaatagtgacttactggtctacatcttatgagacattttcattctatagtagtctcaggcaatgtgtaataaattgaagtgaaaattttgagcagatggaatcttccagcagcccctcaaattacagctcattgatttgtaattttgactccatttctaaccctgaccataaatactttgcaaaacatatgaagcccataaatgcacaatttgaccatacctctatgagccaatgtctatttttgctctttattctttcttgtttgtttgtttgttttgagacagagtctcactctgtcacccaggctggagcgcagtggtgcaatctcagctcagtgcaacctgcacctcctcatgcctcagcctccggagtagctgggactacaggcatgcgccaccacacctggctaatttttgtatttttagtagagatggggtttcaccatgtcgactagtctggtctcaaactcccgatctcaagtgatctgcctgccttggcctcccaaaatgccgggattacaggtgtgagccaccacacctgaccttctctttattttttaccctattttactcctcctcttctgtggaagattgtgacctccttgtagacagggttcatgcttcttcatttgtgtacatgtttgtagaatttaatcaaattacaagtttggataaggctgttcacttttattcaaaagtagagaaaagacaaaaaatctaaaattgatctttggcttaccatgatttttttttggaatagatacctgtgaagtgagtttttaaatcattatttatttcttttatttttttctgaaaatatctttaatataaatatcttaaaattgattgaatatctgttacctttaaagtgatttgacacagatttttggtaaagtattctataagatagaatgaaacaggcctctaaggcaacatgacaactatgagccaaccatgacttaaatcactgtaagacataaagaaacttcataattttcaatcatattagcctcattctacataactcctttcaagattctcaagttcaatcttcttctgcaatgatctcaaataattttcaaataatattagattctaaataatttcaagctctctgaaaagtgtgagaataatgctctcatattcccatagtacgcttatattcatctagattccccattgttaatgttttacrttgatgttatcagctacctatccttctctctcttcttctttctctttctcaataaataaatagttgatagatgatagatagagagagaggcacatatctgtgtgtgtatgtcctgtctcacaaatttattttctttttttttttttttttttgagacggagtttcactytgtcacccaggctggagtgcaatggcatgatcttggctcactgcaacctctgcatttcaagagcttgaactgcctcaatcctgggttcaggagattctcctgcctcagcctcctgagtagctaggattacaggcaggcaccaccacatccggctaatttttgtatttttagtagagatggggtttcaccatgttggtcaggctggtttcgagctcctgacctcatgatccgacctcctcggcytcccaaactgctgggattacaggcgtgagccgctgcacctggccaaccaaattgactttctagtatgtggtagaaaggcaataaagttataaactaattttaaaaagataatttcagaaagctattaaagctataaatggtttaggtcaaataaactgagtgacatcttaagttatatgtgcatgtgcttgkgggtctgtatcaaatgtatctcttattgacaaacatatctcgtgaagtattcacatctcctttcttagaggatgtggcactgtctgaacaacagcctggtgttcttcagaacaatcattttgaaccrgcatttcctttggaatcactctcaatcttttctcagcctgttcaacaagactgtgtataaaagtagtagagtggcacctaatagttagctcttgagcagatcattcaacatggtttaagttgtgaattttgactcaaaaatagatgaaaattaactacttgagaatgtgttacagatattatggctctttacctctaagtagttcagtgtatggttcctaagaacaagaccattctcttttatatccataaaacwattattaaaataaggaaaataacgttgatacaatactattacttaatatacagaccttatccattggcatctttctctattctatcttttgtagcaacaaaaaggaaaaagtctgcaaatatttgatttttacttaatttttcatatattttaagctctttaagtaacttttaaaacttttaaaacacattaaagtgtttgtgggctgccatgtatcaaactttaacataggtrttacttttttaaaatagtttaaagtgaccttaaagtgtcttctgctaccttattgaattaaaaagtataacacataatagtattcattcatttgttcacccatctatttagcagtactagtagtgttggagatctatatagcactgagacaggatgagacattaacaggatgagatgacctgttaatagactgtgatcattctataaatattgcagaattcatagaaataaacctagaagctgaggctgataaaatactacagctgtccrtaatcattcacttaaaatcgaatcatcttcatcaatttctggatgattttgttaaaatcaaacattgtaacttagaagttgaaaaacatagtttctattttaaaatattttaaataaatactgtttttctcttgttattgagattttacataagattttctattaaaaaaagattctgtttctaataatgcttaaagataacttgtctagacctgtggtttctggatgtttttggtcacacaccacatatgtttaaaaaaaattttatatctctaatgcatatgtgctggtttatttataaaagtattactagtatactagtattacatgtttattataaaacttaccaaaaataaaattttaaggagccaaataaaaataaatataaataaattttgaatgttttttttcacttcaatgaattatcttgaacaatccttggggttcttgcaccatgctttccttgggccaggacttatcttcaaggctgaactattttatgtttcattatctattccaggttattgttttatggtggtgactactactatagtacatagacctgtttaaaggtcatatttttcttgaggaatgtgcattcattttcatatttrcatatactcctaggtaaggatcattttcctggggtgtactcatttatttcatatttgtttataaatatttgygcaccacagtgtgactcttacattttttgcttgtcataaagttttagataagacacttcaggaaacatttgtgctaaaggtaaagaataatgaattaaagaggtgactaaatggaaaactatttttaccgtaaacaatgccactccctcagtcctcctaaaggatgatttcacacattaagaagacgtagataactcaggaaagagtgtttcttttaaattagttgtaatttcatgttcatcgcaatatgtgacaaggaaatagggaaaaaacagctaaaagctatatatgtgtctgtcaaacacttgtaaaattgtttaggccatagcacttggaagttaactagattatcagctgtctgaggccagtgttggtgctcttcrtttttatgtgtcctaatgtgcttttgtagaaataagagctcaaatgtgtgttaaatgmatgttagtgrgttaatcaatgaatgagaccttacatcattttccaacttcaaaacatataatttcagtcagaagtaacaacctaaatgcttaacacatagaagctaccagaagttttatattctctttgaagtctccattttcatgatgctaaatctgtccccccaagtagtctcatacatccttactttcctcaccctccttatattaacggtaaactcaattatgacagtctgacttctgacattttaaaaccrttcggtatatcaggtgctgtattacagttttctttacatttctacattaggttcattgaacttcttgcatatgtggttataagacttttattaaatttatagatttttcatccattatgtcttaaaatatacttaagaactcccccccaccaatttattaggccacttaagcttgtcccacaactaactgaggctttgttcatattctttttcaatcttttttctgtttcattttggaaagtttctattgctgtgtcttcaagcttaccaatcccttcttctccagtgtctaatcagctgttaatcctgtcccctgcattttttattctagacattgcaatttttttctagaagtgacacgtgggttttttttttttttttgatatctctccttagaatgttcagactttcttctacttattaagtgtatggagcgtagttgtaattactgttttaatgcccttatctacaaattctatcatctatatcatttctggtctgttttctattttttttattattttctctgcattattggttttattttcctaaatctttgcatatctgggactttttattgaattccaaacattgggaattgtaccttgttgggtgccaaatatttttatgccttcaaatatttggagctttgttaaaatttttaattatgtttccaagtaattgagttacttaaaaccagtttaattcttttgagacttacattaaactttgctaggtggaaccagagcagtttactctaaagctgagttgtcaaactacagcctagaagctacctacattcagcctacagtttgttttcatgtcttgaaggcatctctaagcactgtgaaacacagagacaaagccaaagccgggccggccccctctactcccagagcctgctagcctgctagcagccatgccttgctgctgttcaggatctccactataagctggatctccactataagctggggacctccctgttggcaactgccaaacaacatgcagtagaaatctcaatctgggagtgggaaatttagcaagccaacttccctttagatgcttgtcttccctgttaagacagccaggctctctgggaggagagaaaggggcaccgggatctaggtgtcactgggcagagaacaaaatcgcccaaggtgaccacccttcccctcccacacaatcttaagggcaagccctcccccttaattaaggctggttactttcatcccaagaacattcccagatgacaattaggacaaggcattcccaaaacagggacagcctgcccctctaggtcaaatgaggaagagggagaaaaagagttttctctcttgttatgcaagcacctacaaaataaatttgcttttgcctcttagactataaagcctaaaattagataagcttttatagaaaaaatttatggacactgatctacggttaattttgcctaagtcattctgaatactcttgtcagtaccctgtatatgataaggctttgatactctggctggtggaaacaggmactatccccattcctgtgtgaactctgaggactattccccgtgttcttttctggttggttttattccccctgcctcaggaagcttcctcccatccttgtgctgatcaggactcacctgaaaactccaggaaaaccctgtagagcaagcgatcgttctatgtaggtctctcttttccatacagcactctgctctctggtactctgccctgagaattctagcctccttggcctctttgaattctgaacttggggagatgtgtggcctctcttcaggcaggaagctgaggtgctggtgacgctcatcccactrtttcctcctctcaaggatcactgtcctgtgctgcctgttgtccaacatctgaaaacttttgcttcacatatttggtctagttttatactcatttaaggcagaagagtcactaactcagttcttgttactctttgacacctgcaagtggaattcctaacttctcacatttcaagaaacacaatatgcatggtatttagaaaattgttgagttcaaaggagatgaatatatgatttcaaagggaaatttctaacaggtttaagttctattgtcaaaaacgtaaaatatccacgttgagatgcacagaatttttggaaggcttcccaaaggacctgtaataggtcaatgcaaaagttaatcctcttttttaagaaggctttgcaaagatggtagagttttcatttaatcttaacattttactatacattgcatatcaacattttgaagaaaattaggtaaaagttgtagcatctcatttagccaatgtccatgtacaagatgatgaatgtatgtgcttgggcaaaaagatgaaaagcttagttcctgctgcatgtattaaaaagttaagcgatcacatattatacaagagagagtttggataaagtggtttccagtcatgattttgagacaatccaaagtatagcaaattatgtcggagagttctaaaattctttctctcagatttgaaaagttaaaactaatttgatactcaaaattgattttcagaaagcagaatagctcaatgagcaagcaattaaactgggggctgattttatggctccagaaagccaggggtacaattttcctgtttctgactctattcagtgaaatttttaatctgtctgtgatttatgaaaatggaaacctatctgcaagaataaaatacatttagctctagttttatccataaggagggcatttttctgaagagtgtgcttttcttacctctaagatgatatccttttgacagataaacacatcgaactgcttctcaagctaccagcggagttcactgtgacagattgccaagggaaaagaaagcttattttcttcttgtcattaatagttaattgttattgcagtttctcagatgggaaaygtgggttagggaaatcatatctatcctttctaaaagtgctgcagtattattagaggtgatcacatggcagaaaataaacctattccttgaggaattaaatggagtgggcatgtggatttttctctctccctcctttaaagcactttcacgagtagtccacctgggatagtaaatcagtgttaatgtttcatgaaagctctcatgttctggaacaatttgcattgtggcacctctgaaacttgcccttttgggtgtcacgtggctgcccatgttaatgattcatgcattactgaggtgcttctttcacccactctactgccagtgtctcttgtgcaattatattgccatttacaacagcatcttatagaaccgaggactcacttttctaatctaacacctctgagattttgtagctttctaattttttctaatctaaaaaaagtgatcagtaaggatcaactgatagaaaagcagaattgtaaactgttcttgcatagcagaaagactgagggatcactttgacaatccctaccaattgaccaatgcctcttttaaggagttcttgattaaagtgagctgaaaagctaaaataaggtaatattataaaaacatgaaaatctttttgtgactatcagtcagtgctagatgacatcattaaaattttgcttaattggctgctttggaatcaggcaaagtctgtacaagaaaacacaatgaataatgttttagcagtagaattgggccttatgtccactgcttagagctatttgaccttgggccagtcactgacctctctgcccttcatctgttgcttcctcattggtagtgtggacatggcaatagatcttactgcatcagggtgtgggaacaatttaatgaactagtacatgcaaaaggttcaataaatgttgacattgttaacaatcataaatatccaacacaacctacatttgcttcagatacctgcgaatatacaatgaaagtggcctggagaccagcgttgcctgagttgatggtctaaggtttctgctgtgttttgcatggaggcctgcctctacctaatggtgttcacttagaagcatttattttaagagctatagcatttgcttttgaaccttttgcaggcagttttttctcagaaaaccgccaaagcattcttaaaaatgcatactttcacctatttaaccagccagactacaaatatcatgtctgtcttcatttgcttttaaagctgcccaaagaatttcacatttgggagaatgtttactgaacttctgtcataaaatccacataaaatgtagatgagaatgtcatattttgtaggcacctgtcagttcataataatgtcccgtgaaattattattccagaacagtacctttccttgtttgttatgcattggttgagaaactgcagtggcgtccatcaaatgcaaacatctaacatttactctgaagttgctcttttttttatcttgtgtttttattgatgtgaggttttattatagggaatctacatcctacggtcctcactgtctccgagaaatcacaaagatacctaagggcacactgactttttgttaaacgcttcactgcacattcactaacatgcatttctctttaggagaataatcagttaaatcaaatcctagttaatgctgacaggatgtgcagtcatagaattgccatagcgcatttcaattaggtttgcttttcttacatatgaggtcttaaaggtaattggctcagagagtttttgtctttctgtgaaagatagacatataatcatgctattttgttaaggagaaagaaataggcatggcactgagattgccattgtcatttaaaattttaggtacatttctcactagagcattctcattctagttgagaaactacttaacttccaaacaatttatcagagaaatgatttctcagtaagcacctccaggcaacttaaggttttggtatgattttcatatttattatacataacagtaacatcgttgcattaattcagtattcaagaaagtgatcttttaaaactgataatcaaataactgttaaaagttaagtgatgactctcaaagagattaatgcattgaccttttgccactaatttttgcgtgtacctagaaaatgagggaaaagacctctgtgaaagtaatgatattatgtctacgttcttaaagaataartgtttttaatattactacctaatgttaggaaatacacactgagctgttctaccacttgacattttatacctgacttctgcaaagcaaattctagggactgtatgtgctttgaatcatcccattcaactgcaccaattgcttattaattttagctgaggtttttttggggacagagctaccgaaaataacttcagggtagctctttaaggcttcacaaaccatctgatgcttacctggcggtatttataagggaatagtccaaatgaggagtgataaatagtgaaacatgatgacgtcactagaaaagtcccactgtatttacatgactgctggtgattgtttattctttccttgtgggatatcttatgaaaacaaattgctaatatgctttccatttcgaagtccatctaaataaggtggaaactggctcagcaacattctgagctcacctttgtccaaaattagataatatatcaacaagggaaaagttaaaatctaaaagaaatgtttcacagaatatcgtttttaaaagtacgactttacataatgtttatttagtggtcatgtttagtttctctctcacacttttatttgaattgttcgtattgatagatgaaacmatattcaatcaatttagcatttattgaggatctgtattcaaagttcatcaacaaaaaataaatacaaagatgaagatacttaaaactttccatcaaggaatttaaaatatactgaacttaaatttagaatccagtggtaaaaatggacaagtacattgtatctggtggggtggtgggagaagatattggttagaagatatagaatttagtgaagaggaataagttcaagctatctactgtacgacataatgactatagttcttaataatgcatatttttaaaagatgggcaagtagattacatttattagaaatgcattcagcagcaaaaaccaacaaattcagttaagaggctaacacaatgaataattttaacttctcacatataagaaatctacacatgagcaatcctgagtagatgcagtagttcaacaatgtcccatccctttacttctccatcctttgcatttgccttctggctttgtactttctacctcatggttgcaaaagctgcacatctctaagcatcatgtcagtgtttaaggaaggaaggggaaagagacaaagagctcccttctactgcctgtcttttttataaggaaacataagctttcctattaagttccttgcagacatctcagaactgtgccatgtgaccacacctagctgtaaggaaggctgcagaaatgagtagtttttccaacccttctggcgggaaatggcaagagaaaagaagggacttgagaatttctgtggggtcaatctccctatactatctccacatagaacaactaaatcaaacagaaagaaatcagttgtaggacaggaaaagagcaatttctgatttagagtaagaagatcatggaagtagcacttaggttggggattttaggataagtaagatttgttaaaggaattgggaactacaattctgaacagaataaacaatggaaaggcaataggggtaaaaatggcacggcatgtctgaggaagaggcaaatggtagtatgatatgtctggatctaagagaatgtacaagtgtgcttataaggaagttatgtgctctgaatttataaagagattttgagattcattcatagaggacctttattgctttgacaaatggtctaactttcagtagtatcaggggaaactgcctccgataattcaacgtgagtcctttcctatttgccctaagtgttggccagtctgagaaataragggagagagtacaaaagagagaaattttaaagctgggtgtccaagggagacatcacatgtcagcaggttctgtgatgccccctgagctgtaaaaccagcaagtttttattagcaattttcagaggggagggagtgtacaaatagggtgtgggtcacagagatcacatgctttaagggcaacaaaagatcacaaggcagatgagcagggcaagatcacaagttcagggcaactagaatcactaatgaacttccatgtcccactgtgcacgcattgtcattgataaacatcttaaaagagttcaagagcagagaaccagtctgactagaatttgccaggctggaatttcctaatcctagcaagcctgggggtgctgcaggagagtagggtgtgtttcatccctatctacatctgcataaaagcagacactcccagggtggccatttcagaggcctcccctgggaatgcattcttttcccagggctgctaattattagtattccttactggggaaagaattcagcaatacttctcttacccgttttcagtaataagagaaatatggctctgtcctgcccagcccacaggcagccagactttaaggttatctcctttgttccctgaaaatcgctgttatcctcttcttaaggtgcccagatttgatattgtttaaacaatttgtgcagttaacgcaatcatcacagagtcctgaggtgacatacatcctcagcttatgaagatgatgggattaagagattaaagtaaagacaggcataggaaatcacaagagtattgattggggaagtgataaatgtccatgaaatcttcacaaattatgttcagagattgcagtaaagacaggcgtaagaaattataaaagtgttaatttgggtaactaataaatgtccatgaaatcttcacaatttatgttcttctgccatggcttcagccggtctgtaagatacttaaaactttccatcaaggaatttaaaatatactgaactaaaatttagaatccagtggtaaaaatggacaagtacattgtatctggtggggtggggggagaagatattggttagragatacaaaatttcgtgaagaggaataagttcaagctatctattgtatgacatgatgactatagttcttaataatgcatttttttaaaaggtgggcaagtagattacatttattagaaatgcattcagcagcaaaaaccaacaaattcagttaagaggatgatgcaataaataattttaacttctcacatataagaagtctacacatgagcagtcctgagtagatgcagtagttcaacaatgtcccatccctttacttgtctatcctttgcatgtgccttctggctttgtactttctacttcatggttgtaaaatagctgcacatctctaagcatcatgtcagtgtttaaggaaggaaggggaaagagacaaagagttcccttctactgcatgtctttcttataaggaaacataagctttcctattaagttccttgcagacatctcagaactgtgctatgtgaccacacctagctgtaaggaaggctgcagaaatgagtacttagtttttccaacccgtcttgtgggaaatggcaagagaaaaggagggacttgagaatttctgtggggtcaatctcccagtactatccccacatagaacaactaaatcaaacagaaagaaatcagttgtaggacaggaaaagagcaatttctgatttagagtaagatcatggaagtagcacttaggttggggattttgggataagtaagatttggtaaaggaaatgggaactacgattccgaacagaataaacaatggaaaggcaataggagtaaaaatggcacggcatgtctgaggaagaggcaaatggtagtatgatatgtctggatctaagagaatgtacaagtgtttttataaggaagttatgtgctgtgaatttacaaacagattttgaggttcattcataggggacctttattgctttgacaaatggtttaactttcagtagtttcccagaacttacaaaatcaaactcaaactccatagcccagcaatcaaggtccttgatgatttggacctaacctgcattacttgttcattctttccaaccactatatcttgtatatatgccaatatctatggtcaaactgcgtatcttatcacctactaagcccaaacaagactttcctgtagccacacaatgtctcctactgtgggttctattgaaatgctgaaatgttctctctctctctctagagtctgtctagagtaatgactcagagccagttcaaggttgctttcatttgaaatgatttccaaacaggcagccaatatacataggatttggatgcaagtgaatggatctaatgctctagtttctccctgttccctcctgaagacacatctgtaattggttggttggtcaactcagacctgtgagggtaagaaatctaccagatcaatgccttttgtaccacttggccagggggcagaccacatcagaacttaaaggtctatatattacatataaagaactttatgctttggcacaattatattccacattctgtttctggccaagacccacacatgctatatgaaatacatatacataatttttctaatattagaactatatatgtgtatatagcctagtgattaagagcataggctctggagtcaaactgccacagtttaaatttcaactctacaacttacaacctatataatcttgagcaatgcatccgaatttcctcatccttasaatgggaataataatattatctaccacatttggttgttgcaaggattaaatgagacaactcatgtttaataaactgctaatggaaattcatattttacaacctccctgaarggcaacttggcaaaattataaaaagtcccagctgaaacaggaggatcacttgagaccaggagtttacaaccagcctgggcaacataggcagactctatctctgcacaagtttaaaaagtaaaaaaggaacccaccatgggggtgcccacttgtagtcccagccacttgggaggatgaggtgggaggatcgcttaagcccaggagcccaggatcatagctgactccaggcttcagggagctatgatcacaccactctactccagcctgggccacagaatgagatcctgtcccaaaaataataataaataataaaattatatatatacatatacrtatatacataaactccctcaaaaatcattgattttaactaattctataaattctaagaaagcactgcaagaagtacaaaaagaatgttacaggataaaatagaaacagcataaatgtccatcagtaagatctaattaaatgttttaaaatatttatacaatgctaagataaacctatacttttggtttagaaaatggcatcaaatattaagtgacarcaaaagaataacatcatagaaaataaaaggctattcctgtgaaagaaaaattaatgatataaaggatatatactatctcrttcgtgtgtgacaaaataagcatggggagagatacataaaatattatttgctatcttttagtgaatatatggacatgatctttatttctttatactgttttttcaaattttcacaatgggcaatctggaaactaaaactttctttttgtagcaatgatcatcttgaaatttgagtttctgcaaacaccagtgcagtgacccgtggtttacaatatgttcgcacgttcatcaaggctgtcaacagtctgtctttgcatgtgaagtcagtgggtagtgtggtggaagccaggaaccaggaaacagactgattctaatcccatttctgtccttaacttcttgtgtggccctgagcaaactttcttaaattgtattgagccatatggatattggtatagtatttctatgaagatgtaggtaagtttacttcttatttaattagctagcatcaggagtcttcttttttttttctgtcacccaggctggaatgcagtggtgtgatcatggcttactgcagctgcagcatcaacctcccaggctcaagtgatcctcccacctcagcctcccaagtagctgggactacaggtgtatatcaccatggctgcctaatttttatatattttttggtagagacagggttttgccatgttgccaaggctggtctcaaactcctgagctcaagcaatctactcatattggcctcccaaagtgctgggatcacaggagtgagccactgcacccggcccagaggtcttcaaatggtaaagaaaatagccagctaaccaacctaactataacaagcatacaagaaataaagactcaaatttaaagttaaccttaacacacacacacacacacacacacacacacacacacacagagccaggaacaggtgaaacaagacaggcattgagggcaaaaaatttaagaagacactcactctcagggtcatgcaaacagactatcttatttgaattccatttctaaacctccaaaatgccaaatgcttgcactcccctaacagtaggtatctccttaaatttttcatcctatgtgcctcttatcctagacccgccatccacctgaatacataaatacacacacacctgcacatgcatgttacacacacccatgcaggcatatacacaagcacacatgcatgcacaccttagtggcagtaaagaagatcaattgcaaataatttctgagaataattttcaattctgtttcctcatcaaatagatacaaatggcctaatcatgcttagaaagaagaaactgacctgccttctgataggtagtaaagaatggtagagaatctctttcctcaggcattatattttccttattttacttctgcatgacttccttctgtttctccatgggcagcattgtctcggcatgatcctagaattctcatagtagaacctatgggaactgtatgggaagctaccagagcacctatccagtggtcctgtgagatcttccaactgatctttttaccacaagcttcaagttgttacatgtttgtgaagtacttgttggcctcttgtctacttgaatttgcatactgcttcttcttggtgtttgcacttagatttagtattcaactctggacatattgacttggtattgacaaacccaaagagtgcttcttttggtgattgccctgcaattttatttctgtgatctgcaggtgctaactccctatactcagaactggcccctggactctactggccaggagaaggttttaaagaaatgaaattctgtaaaaatttgaaatttggaattactgtattatgccccccggagcgcttcagagattaggggcacaatccagcaatttggctcatgagctgatggcaactgctttagtgacaaaatcttcacataccctgaatcaaaaatttatttttctaagatatggtaaatattctttctaaatttgggttttgaagataaaattaacagatagccttatcaaattggcttctattctatgtgggcatgtaatataaaccaaatctacatgataatattttgcccaaatactcattctcatgagttaaagtaggtaaatttgacatatgtagaccaaaagttacattcacattgacatttcaggtctaacttttcttaaatcagcaatttccaaagcacaaaattggaagaaattttattcaatactgaaagtaattacttatttatagtctcacagaatcatatattgaaaagctacatctcaagatatagacaccaattataaatgttggaaacaaagagaaagaatccctggcatagacatctgaaaacctgggttggaagcccaggtcttccaatagcttcatgaccccagatgggaaactaacttactctaaatttcgttaaatgcatttgtaaatttagagagataagacaatataatctctaaaaatctcagcactttaatgtgacttatttcttaattattatctaacagatgtttgcaaaaagtrtaacagtacatttggaggtaaataacaaaatcactgccctgtcattgccattattatttaaagccattttaatggttgtatcttgtgcctaattcccatgaccatatattgattaaaatctgacaaaatatgacttctcctacataagtcttctcaatataatttgctcatcattacctgatagagtaaatgagacagtatttcatcaatcatgaaaagacatctgtgaaaatattactctttacgaagttgtattaatttaacaaattatgtttgcaaagacagctgttttaagctggtgctgcttgtattttataaataattcaataattcttttagtattatttattttatttcaatgagaacgccatatgatctaacattttttctttgctatcaggaaaaggagctaaagtagagggtgacaattatttatactgtacaatcattctgttcagcaatgtgagctaaagacaaactgattcttacaggtttccaataaatattctctcaattttgtggccacaacctactctgcgacacccctgcaccatctgtttttaccctcctatctataggatgaaagccaaaaccttctgtaaggaggatgtgggagaaagaagagttcaatcataatatcttaggaaaagctgtttattctggattgccagtaatattagatggatatattagtctggattttccaaagaaacaaaaccaatgggagatagagagggagggagggagatagatagctatagatagatagatagatagatttattataaggagtggctcatgtggttatggaggttgagaagtcccaaggtctgcagtcagctagctggtgatccaggagaaccaatagtatagttccagtctgagtacaaaagcctgaaaaccaggagagctgatgatacaagtttaagttgtaatccaaagacatgagaaccaagaaaggcaatggtgtaagttcgaatctgaatccacgtacaagagcgggagaaaaccggtgtacctactcagtcaggcagagaaagtaaattatttcttacttgggggagggtgagtcttttgttgttttcaggctttcaacagattggaagaagccaacccacaatggggaggcaatcttatttactcatttttcaattcaaatgttaatgtcatccagaaacaccctcacagtcacacccagaataatgtttaaccaaatatctgggtgccccatatctggtaccccatagcccagccaagttgatgcataaaattaaccatgacaatggactttaagaaggtagagcccaactccatctgtttccaactaagaatgctgaacaacagatatataaaggaactgcctagtttgtacaattagaggaagattcagggtcataacctaaatctttatattttattatagatctttttactctatttaactctcattctactatgctacagtagttcttttttaaaattgttattaaaactaatttaaatatgatcttctccatgttaatgaataccacaccatgtgtggtggggtttgtggggagaaggtgcatgacttaataggcatgtggccttaggaaaagtcattaatacttttttttttttttttatgagatggagtttcgctcttgtctcccaggctggagtgcaatagtgcgatctcagctcactacaacctccgccacccgggttcaagcgattctcctgcctcagcctcctgaatagctgagattacaggcacgtgtcaccacacccagctaatttttgtatttttagtggagatggggtttcaccatgttggccagactggacttgaactcctgaccccaggtgatccacccacctccgcctcccacagtgctgggattacaggcatgagccaccatgcctggcctcattaatacttttgagcctcagttacctcattagtaaatgaaaaaaatacctactttatgagtttgctgtaaagattaattgggtcaatgtgttaagtgtatttgcagtgactgggacatagcaagtgctacctaagtgttagctctttttattattcttgatatgaaattttatatattcaagtttctgcttattgctcctcttagccccatccttttttgccctactcactggcctaatgtgtcagcaggttcctgtttctctttgataccatatcgcattttgtaagtactcatggacttccacatcaagctctataacctcagcayaaaaaaaaaaaaaragagagaacagtatgtctaaaatgcagtgggtaggggggaaagggtttagacagatttcaagagacaggaagcggcttgatcatgcactccaggtgttttagtatgcctattctttgctagcttttggtattttattttagcgaaatagccaaactaatgtatgtgcccacattcattacagtctcaagtgccttccaacattggttgcatattcccagatgctggctgcacctccaggtaaataggtagactgaacatcaaagagacgagaactgtctaggctgtcatgtattttaaccatatctttgtgactattggcttctgaatcaccgttataatatgattaatatttatgatgagctgctaattaaaagggctggctaagaagcctacctgctgctgctctctctgagattctgccccatgacctgccctgctacctgacaaagtgtttgtggcatggattattgtggatgctgtaaatttaaaaaacggggcttggactgggcttattttataaaaactcatctcttctttgaaattatttgcacatcaaacatttagagtgctcttctttttctcatcaccaaagatattttctgatgtttatttccaagaaagaattgactttttgttacttaatggaaatttcataagaaaacacacacatatctatgtgaaaatatatgtccatagggtaaaaaaaaatcagtgctgtaacatctttaatgacaaatataaatattacatctgaacactgcttgttagaagtacatattaatttctctcatggctcttaatttctttgaaatgtcatcttgccaaagctcaatacacaaagatgaagctttattttagaggaaataaacatgcgattctgggagctcaattgaaaattttaacaactgaggaatcaagaacaatatacttaagtaattatgaaataatacattgaggtatgtctagatttaagagtgtttaatataggtatatataacatacatgtggtatgtgtatatggtatacatatccaacacacatagacatagacttatcctacatggctaaatggtgtactttaagctataggtactctggactgttttttgaggataaaaattaatgtgtacaggtatggtcagggaggtaagcggatcttagacttgtctttctctgattgaggggtttggtgcccttaaaagattgcttatggagccccttatacttcttctaccaaggtccttagactactttttgttatttactatttctttacactttttattattttctgtttgcctgcatttatttatccaacaaaaaatctattgagcacctagttatgtaccagggactaggataggtactgggttaaacaaggcaaagtggcttactcctcaaagagctaacattgagacaacaaataagcccacacaaatggggttattagagactataataaggtctatgtaagatacataccagatactgagatagagaatgtgatragggtgggggtggggtgcttctttagataaaatgattagagcagcctccatgaaaatgaacatttaagtcaagatctgatgaatcagagtaagcagcatttcaagatttggcagatcacattatgaacagaaggaagagccaggacaagggtttgcaaaacagaaactaggccagtgtggctggagcactggaaagaaagacaaggccagtgaagtgagccagagacttagatatgcagggctttgtaaaccagggtragctgtggagcctgttgtaaaagcagtaggaaaagacaacttaaagagtttctgcactgaatagataaaatagatttgatctcgtgtatatttttaaaatatttctcttgatgttatatgaagaatggattggaaagggacaagaatggaagcagggatgctataatagtatcccaagacatagatgacagtagttgaatttggtgctgacagtggagacagataaaaatgggaagattttattgtatatttggaagcagaactaacatatctgaggatggagtgggtgtggtgagggaagaacatgattcacaggtacttcccaggtttttacttgtataattgaatgattagtagttccacttactaaaatgggaatgttagaataacaggtttaaaaataatcagtatctcaattttgggcaccttgaatttgagattcctttcagacatctcaatcgagatatcaggtagtagttaaatataaaagtctatggaactcagaggaaagactttggctgaagacagagacatttggaaaatatcagcacatagaatgtgtaaaacatgggactgaataaaatttcctagggaaagagtataaaaaatagaaagagtagaaatagaaagtgtccaggcaggaaccctaagcatcatcagcattaagaagttgagtagaagaagaggagccagtgaaggagatgagaaagaacaccactggcattggagaaaacccaggaatatatgatgccacagaagctaagagaagaaagtttcaagaagacaagagtactcaatggtgccaaaatgatcctgagaactagataaggacacacagtgtctattggaagtggcagtttggaggtcattggtgagaccattgacatgattggtttctttccattgttgagataatgtcagatgagagtgattgaagagcagaatagagatgatgatgaggcagaaactgtagatgatttgcttgaaaatactttatgtggaaacaaagaaatgggccaatgggtagagagagatgtggaatctatgaaggtttaattttcaaggtagcttatatatatttataagcttgtaggagtaacccagtagtgaaggagaaactgatgatgtagaaaatgaaaagggaagaaaattcttgagaacacagttggggatgggagcataattggagggattttgcctttgataagagaagaaaagagctttcacaggactgtgagggcagagatgaggccttcataactactgtatgcccaacattccttggcatatattagaaactcaaatatttgttgagtgaatcaagtaaacattcatttcaagccagggaaacaaaacaagcagtatatccaaagagagagcttgaaagagcaaagcatagtcaaaagcaaagagaaggatacgacttatccatactccttcatcagttattgcttattttataatgtgtttagacaattttttttagacagagtctcgctctgtcacccaggctggagtacagtggtgcagtctcggctcacagcaacctctgcctcctaggttcgagggattctcctgcctcagcctcctgagtagttgggattacaggtgcacgccaccatgcccggctaatttagtggagacagggtttcatcatgttggtcaggctggtctcgaactcctgacctgataatccacctgcctcagcctcccaaagtgctgggattacaggcgtgagccaccatgcccggccttagttaaattttttttttaaatcacaccggatttttttttaatatacatatacagccactgtggcatttcattaatttccttttcatggtttactttatgtctattgtgatcccctaaaaacgtaaattctcaatggaagagatgtgttttctaccttggtaattcattttgagatacagggcagggatctaatacatttgttgagaagcatgtaattttccttagcttccatgattatctttagcactgataaaagtactgattatgttaaaccaaaacacatatttataaatcacatatctattttgtcttaaaggtgctaattggcacttggtaagatttaattcacagtcatagagtcaatgtttgtttacaaggctagggaaactataatgttaaaaaaaagtgtatattctgatgagggacacataaactcattttactcacttttattgtgcctatgtcagggtagtcaaatgaaatggaagacagattatctgttattaaaaatctgctaaatacggccaggcatggcggctcatgcctataatcccagcactttgggaggccaaggcaggtggatcacctgaggtcaggagttcaagaccagcctgcccaacatagtgaaaccccgtctctactaaaaatataaagattagtcgggcttcatggcaagcacctgtagtcccagctactcagcaggctgaggcaggagaatcacttgaaccctggaggcagaagttgcagtgaaccgagatcgcaccactgcactccagcctgggtcacagggcaagactctgtgtcaaaaaaaaaaaaaaaaaaaaaaaaaaaaatctrctaaatacattttgaacatataggacccaataaaatgtttctgacagtttgttatttagcaattgccttcctcaaaacacatgacagtgagcagtactccaaaatcaacaccgtaaagtatgcacatcaaataagatgcatttggtaaccaaacatatttaagatttttgtttactttttgtatcaagaatgattctaacaatgacaataaatcttaaaattttgccgctggctttggggtaaagagaataataaattttgaggtactcatatatttctctagtttgtgatacaaatagaaatgatatttatacaaactctaatggactgtataaataataaatgatgtggctatatttttatcatggtaataaaaagtcaaaaataatatactcagaagaattcttatgagttaataacaaacagtgaatttattctcacacattcagtggatgaggatttatcttattttagagttactatgaaattttcatttgtggctttctggaaaatcatcaaaggttgatcacatttcttattattctgttttgaagctattccaacatcctatttacttgaacttgcttgagtcttcaaagaatattacagttatatttagaaagaatgtcaccttaggaaataggagatgtaatttaatataagttgggtgtgtaacaaaagagcccctgagaaagggtcatttgaactgagaccttttgagaattttgagaaatagtaagccaggtgaaaaatgacaaggagaatatgttagagtatgtggcatcccaaaaggattttaaaaaaatatatattgccttagccatactagcatggcaataagacttgcattataacagagattataatctccctaccctctctcttaccacacctctacacatcaactatcactagatctctagcccttctcaactgtcccaccctgaatctctagaagacatccacttgctgtcataagaagggttcttttagttttgcatgacatatgcagaagtgaagttttctgctcttactctccgggtcaccttctatggggtctcctgtgcataggaaattgccatagttgttggcagtggtagtatctgcctgtggctatgtcaaggtttccaggattgatcctgatgtcattgatatctgcaccaaggacactgttctctgattgctgctggggttcaaggtcctgtgtcattgaggacccatgtgtattgatcagctgtcggaggccctctgggctgaagctctgcactaaataccaccaaaggaaagggagtcttctctcgtgtcttttcctccatttgtgtgtgttcgttagttatatatttgcccaaaatgtcgtaaaggcttcgtttggttttgttttatttcaagcttcatttccccagagttctgacacaagttttgatctacattcctcttccctcccctccatttcactccagtttattgtccttaaattcctcttttgagacctagccctcatgtcacttaggacaaattccattccaagaagttctttagtcattcatgtaaatagacacatcactatttctagctcataggccttctggttatgccagattttcctgaatccccaggtggacacaccattatttctagcaatggccattctcatattaggtctgtatttttggcaactgagttaagcaacaaacaccttttacaaaatatatttataatgtgattacatgtacatttttaaaatttcacatatgattccagaattttcatctgttgtctatgggggggattctagagacaaagtatctggcttaactagctaccatcttctccctcatttcttcaaaccttgttaaatagttcattagtaaagaaatgtggttagcttgtggtatatgagggaacttcaaaaagttcatggaaaatggaattaaaagataaaaataagaaatataaaccttatttctcaacataagctccattttgagttcaagacactttggtagacaatgataccagccatttagtccatccctaaagaactgagggtcctgggaatttaactatgtcaatacagtattttttacattattaactgaagaaaaatttgtgcccttgaaatatattttaagattaggcaaccaaaataagtgagaaggagccaaatcagaactgtaagttggatgcctaatgatttcctatcaaacctctcacaaaattaccctcgtttgatggaagaatgagcaggaacattgttgtggtgaagaagggctctctggtgaagctttcccaggtgtttttctagtaatgctttggctaactttctcacaacactctcataataggtagatgtcattgttctctggccctccagaaagtcaacaaacaaaatgtctcgagcatcccaaaagactgttgccatgactttcactcttgactgatctacttttgctttgactggaccacttccacctcttggtagccattgttttgattatgctttgtctctaagattgtacaagattaaaaatgataaagccatgtttaatctcctgttacaattcttcatataaatgcttcaggattctgatcccacgtatttagaatttccattgaaaactctgctctgatctgagcatgattctgaytcccagcatgttgaaactttgctcaactttaatttttcagtcagaattgtgtaacctgaaccaattgagatgtcaatagtatttgctattgtttctgctgttaatcattgtccctcttcaattagggcacaaataagataaaaattttccttgcaaattgatatgatgatctgyactgcargcttcacattcaacattgtctcatcccttcttaaaacgagttatccattggtaaactgctgatctctttggtacattgtctcaataaacttttagtagatcattaatgatttcactattctatccaaacttcaccataaatttggtttttgtctttccttaaatggaaagaattctgctaaaattcttcaattttggaagaattaatgttgctctgacaggggctcttttcaaactgatatctcattattyttagtgcctcaaagtagatcctgttcagacatgttacaacaagttcatttgagtttactttgtgcaaaaaaaatttaaattgatgcatcttttttcataatatrcattttccatgaagattttgaagacctctcatataacagaagtcagcatgtgtacaaaatttagtgtttttcttaatacctatcccctatatgagaatttgaaaattatttgaaacttaaaggttttaaactatctttaaaataattacatcttattgtccatatttttaaaataagctaattgcaagatataagtttgaaatttacatcacttatgagatgccactattagtaaattatgacatagatacaagatatgacagaaaagttcaccaagagacaaccatactaagcagaatgggtccaacctttacttgtcacctgaagagtagccacatgacatagttgaaaaattaaatatggggtaagaaggcctaattctgccatttattagttgtcatttaaccattttgaatttcatcgctgaaaatctctgcccaacttaataataacaaaactatcttatggtaacatttattgagtacatattaggttccaggcaacaccctacacatcttagaagctttctcaatcaatccccttaacaacctctgacgtagtagaccattatcttctctttcagatgaagaaactgaccttgtgagaggttaagtaactagcccaggtttatccagctgagttgaagagttatgcttcagacccagtmtgactttgaatcatagcacttaactggtgtgctatacctaatgggagatgatgtccaaatgtggggagtggtattaactctgaaatcactgtgktttttttcctctgagatatgtggttgaagcaagtcgtttctcaaaaatagccactgcattctctgtaactgtcaaccacaatcattttccagatacacatggtaattttgtattttaaaaatatctgaaatcagctcaacaaaatattttattcaaattccatcacccacaactattttacatttttttgtatcttaaaaaaccattacatcttatagactttaacatatttatgtagttgtaattaccatatacatatatttgcattatgtttattttacctaatattatagacctgctttattcattcatccaaaagatatttattgagyttctgccataagccaagcattatttaggctctgtggatcatcagtaagcaaaacagtcaaaatccttgcttttttgaagcataccttctaataggaacagaatataatacatcaatgatgagaagtgctaaggaaaaaaataataaagcaaggtaagcaggcagacggtgacaggaaacgtggtattctaaaagagtctgattagtggaggcatctctgaaaaggtaatgtttcagtagagacctgaatgaagggagggagttagccctgcatatatctcagaggatttctaacagtgagacagtttttaaaaaggctctgaggctggcgggggcttggtgtgtttgaaaagcagcaaggagactagaataaatgaagtggaagtcaaagaagagtggtggaagatggggaggtgctattagagagatcaaataggaccatgtcagattctaattttattctgaatgagttagaagcctccagagggttttttaaaaagtactgacatgatctaatttatggtttcaaaaattactccaggtttttgcagaaaataaacaataaaagcagagtggaagcagggagaactgctttggcagtggctttggtccatgatagatgtggctttggcccatgatagatgtggaggtggtagaagtggtcttgttctgaatattgttgataggtaatgctaactggttttaccagctctggagggtgagagaaagaagggagacaagaatgatggctggtttttttgtttttgtttttgttttttgtctcttgtttttgagatggagtctccttctgtyacccaggctggaatgcggtggtgctatcttggctcactgcaacctccgcttcctgggatggctggttttttaacctgagcacatgaaagattgaagttgctagttacggaaaggaagagaattgacagagaaacagatgtagggtagaggtgagtagagtaggaatcaggagttcagtgtggacaagatccagttggttatttaagggggtatgtcaaggatgcaattggatgcatgagtcttgagttctaagggagagatcctgctaaatttcagactatagaggaaaagaagagactaagaattgagcattgggctgtccattgtatagaggtgaggaagatgaggacaaataagcaaagggaacttgaaaaggaatggccaatgagaagaaaaactaagaaagtgtggcaccctggaagcctaggcaggaaagggtatcagggcagaggaaggaatcatttgtgttaagaaggaagatcaacaggaggaatattaaggattgaacattggatgtagcaatcctggtttagtttaacaggagctgatacagggagaatgggaggtggaaagcgttattagaaacaataaatatgggcaactcttttgagacctttgtttataaaggagattaaaaaaaggaatggtagctgaataacaggatatttggatttgttcagcttttgttttaatatgagaaatattatamcacatttgaatataaattagaaaaatctagtagaaagggtgaactaatgatgcaggaatgagagggagaattagacaacaattatctcctgttgatgtaacattatcctttttactgttgatgttcatttaagttgcttctgattttttactattatgttgcaaagaaaatatttgtgcctacttattttttattcrttgagatcattttcttaagataaatttgcagatggggaattactggattaaagattatgaacatttttaatacccttaacactgccctattgccttaaaatcaattccatgtggccagtaatgtataaatgattgttttattgtaaccttcctagagttatgccatataacttgagtccataattcatggaattcctagtgtttcaactaccctttttctatcagactattagcttctaaaagacagagataatgtcttaatttttttgttgccatctatttttagacaaaatatttctctaataataataattacaacagttatctgaaatccctcagggttcaatcataatggtatgcatatggtatggtaagaaaaaaaaagtcatcagttttggaatcagaccagctaatatttgaatcccagattagttactttgcctctgattgagtcactttaatttgccaatcaatataaaaattaataataacccttgtttctaagtcatgctgactgctaaaataagatatctataaagaccctagcaccaagtaagaaaattttggtggaaatagtggaactttgaaaagaaatttatgtttattatgaaactagcttatgagtatttaatatttttattttattttattattattatactttaagttttagggtacatgtgcacaacatgcaggtttgttacatatgtatacatgtgccatgttggtcaggaagataaaaacattcctcatgcaacacaccttgtccacagcccataaagttctcatcttacagttttgctaattcccatggaaaaaaaaaatccccatgaatttcaattctagtaaactgttgaaacagcaagcacctgggatatctcttgggaaagcacaggctgctgcagtagacctgggatccgcagtgtctctagaaacagtaccaggcggttacctccaggtgactaaatgaggcttcatctcagcacacaagcttagaaagctttacgattagtcctgcttgctatggtaaggaaataacacaaagaagagtgcaaatggaagtcgacttcatcacaacatgcagtcaatttccaaacaggtgagataatctctcatgataggcagagggtcctcggtgtaatgttaagagcttaggagggtaaatattaagatttatgyctatatctgttcatgtaaatgtagaaaaatgagtcagcatagaacttatgtgatatctagggaaatatctttagcctaaaagtctgaaattaaaagaaaatgctatgcagtcattcaaaatatcttaacagtaaatatctaccataatcataaggagtttcttgtaaagttcataatcatcctaaggagagtagaattataaatatgttcacttgaacagaactcaaaagttcttaaaagacattgagtggagcagatattttctttgttttgtttagtgtggttcccacactgacatcagggaaaagatgactacaactagaaacgaaaattgagagagggttacagtgggttaattcactaaatctagacatttttataataatgacatctcgggtaccctgtgtttgtgtgcagacttcactaaaagactagtcagtatcttctgttataattgcatgtagggtccagtgagtgaaagtcagtgctatgagacatcatcagctaaattcccagctggggaactcagctttgttgttttttatcagtaaaccaagaaccttactctttaatgttggcttaaatatggctcttatttaaaatgatgtataaatttattaatctgtatagaaagtgctatcctgaggtgaaaaacctcgcccaatgtttattccacttaactttatttcaaaaagtatgtatttagtttccactgtgttctaggcattgtacgaagttctggacaacaaagattaaaaataagaatttagtttcaatatttaaaaacaatataatggttctagtgttggtacaaagtcatagataattttaattttatctgtggtccttgatgatgaataacaatgtcaaaaaataatgcatctggtgtttacatccatcttaataataaaattggattaactttctgtctgattcaatattgcagaaaacagtcatcaagatggcccaaataaattatttgattcaagaagtcaagctctgtttcccacaaaatatagggctgccagatttgatgttatttttttaagtgcaactctggtgtgagacatgagcaggtaataatgccaaatgatggcttggcaagaatttccaagcaggatttagggctcagcagcaagattttagactaaagggaaaggaaagtttttttagtgattttcttgtaatgtttattgcttatatagcttttaatatgaggaggactaacctgtttaaatctttcatttaaaagaaattaagctttaaagaagatgtggcttcttagccttgtacactaaaataccttgccctacagcattcatactcttcaagttaattttaaaaattgctattgcgaattactcagttgataattgatgctggattgtgttgtatcaaattagccatgtctatatttggctgtcacaaaaaggaataagctataaatagtttcccttgtttttctgatcaatatatatacttctaacagttaataattagatcagacatagtgcagtcctaataaataccaggacctcaatcttcctaaaagaaaaagaagactcttattgtggtaattgagaagtaataacaggatgaaataggcagagtcatgttgtgcatcaaagttatgctgcagacaacatcactcagaatctttcttttctagaaatgagacagttctcaaggtgctaatcactaaaataacacattgtggaaaattatatgcttattgttatttttccatatccttcttcagttgaaaggaccacaaaaacactagctaaaacttattccacactctgcctttattcattttaaccatgcagaaaattattaattcccccatgacagaaaaaatcaggattactaagaaaaaagttgaaagacattaaatcatagagtttttatttgcatgttaaaascacatgccaataaacctcatttcattttaccgtgtttcttggagaattgtatagttcaccagaaaagtgaaaacacagaatcccattacagccattgaagtgaaacataaactacttcatggagggaataaaaatgaaaggaaatgtataacacacttccacggagcattagacttcaaactactcttgtgatcagactgatgtttcagagcttgtgtggtctctgtgccccttcagagcttaagcttttgcatgtgatcagttgaaagtcccaaaagagtctattcctattgattgaatataagcacataaaaggtacccatctccttatttcacccacatctgaaataaagctccaawgacctgtaaggacttttaatttcttaatttttttaaaaaagagtagtatttatatattcaatggctcaggaaagtatcagtttatgactagaatgcaaagtcgttgggggctgaaggattattattttgcccatggatatctacttctaagcatccctaaaagcctcttcgaagtaatcatggtctcaattcttactgaacactgtagtgagaagtctctgtcctttcagaaaagctccatgaatgaagaggtcagggctgtgatgattagagttttgttattttgatagggctggatgtagaaacctgaatttgtctgacctcgtttttcagacatttgcctgagtgttgagcttttggccacacagggtttctgcctgaccctgattccagtcattttcaactcaagctttggctgctgggttctgccatcagcatgagaaatactgaaggaaggggaggggaggctgaaagagaacaaggaacaagaataactgggaaaaataacatcccaataaaagatagaaaacataatcaggggagtggaaggtggaaagttctgttgactcaaacatataataatgagaattgaawactctgttaaaaacaagtaacttgctattatgtttgtttactgtacccaggataatatctatttgtggttaaatcgtgatttttctcctgtctctgaggaactttgcgttaaatctgttttcttctatttcatccatagacctgtctgtaacttttataaaaatatttttacaagcataaatggacatgaagtcacaaagcatagaaatgatactatcataaaaagtatatagagtattattttatattttatggaagctttatctcctccagtgaatttgtacttggaagagtggagaccttcaccatttcataatttttaaaaacagcttataaggataggggcttactcaaaattgtatagaatttaaagtttccagaacaatatacaaaagttcttcatgtaatttctaaattttaggtctctgcacatgaaagaaaagtttttatcacaagaatgttattaggggatgtgaaaggggacactaattaagaggtaatattaaaatagagggcagagactaatgaaggaaaaactaggttataaaaagcatttcaaatgagtaggataagagattctattctaaatcattaaatttggctttgtttcaatattaatatttaattggtagtggtaaaaatgaagaaaagaaagatgaatatgaatttaattagatgtccttaaagagtcttctacatgatttaggatttgagttgcatgttcacagaagccataatgtgaagggacaggatggagagtgaatggaagcagagattttgaattcaaaaactgttcttaaaatgtgccgttttgaccttcaacctcgaatatatatattctctccagaaacaaatgatagcatttcagcaaaaccaaattgttttgaccattgctttttcctggggcctagagtttttgattgacttttggtgaaagctccttgacaagtgtaataatcagtaactgtaaacactgcaaatccaatcaggccactttttaatgttgatattattactatcctggttactatgttcaagaccttcatttcatcaacaaagctgttactccacttccccttgtactgaatatccaaagaagcaagtcactaaactattcattttcaacattgatgtgcagtaaacacgtatctttaagcctagtttacygttactttttatctgccacttctagctgttttatagctaatagtgatggcagcggcggccatctggtgcggctgctgccatcatgccggccgctgcagggagggtactgggaggaggcagacagaacccccaacagcagcctgctgccctgggcaccgcccattggagcggggctaggttgtgctccggacaagggggagctctggctagcccctgagctcccgggccacagggggagctccggagagacagggagagctctcggcagcatcgacccaaccccgctactagcccaggcccagcaaggatctggagcccccaccccaggctgccagggggcatggccaggtgccttgctccatggagcctgcggaactgggataagcgggagccctgccccttccaagttggcaggtgggagctccccaggtgcaactgcaaggtgtccaggccaccactgcaacctgggtacccctgtgctctccggagacaggagtaggcagaagccccgccctcctgggccaggctgcagctgcccaagtcagggctgcggatctaggcctcccgctccaccgagcaagcaggaaccctgctccctctgccctcagctgcagccacccaaaccgcagacccaggcatccctgcattcttacctttgcaagcttggagtgcctgtctctgttgccgggcttctccctactccgggcacccgctctaatctgggagcagggttggggctgagcccaggttctgtcacagccccagctgtgtgcacaggctcagggcagtgctgacgtgccaacccccgccccccgccccccccccccgtcccccccacacagccttagaccctccagactttgggtgccaaaaagaagggaagctaaaaggggactaagggcagctgggtgctgaactgcaggtgtctcttggtgccagcagcctgggcaccatggatagccatgggaggcagacaggctcctgggcagaaaagggcaggtctccagtaaagcctggggtccggggccgccagtcctgcagacccagagcaggagctcatggtgctttttcttgggcccacccatggctgcccatgaaccagtcagcatgcacttccccaccctctgaggcccataaaggcctcagccagagcagacagagggtgaagagatgaagagggagaggcaacaaccagctgcagacaggagctatcctctctgctgaaagtaggaggacagaatgatcagctacagagaggagctaccctctctgctgagagtttcagagacctgggaagatgggactaccagctacagagaggaacaatcttctccagggcctcctctctgctgagagcagtagatgtctgcacraccagtagcagagaggagctaccctctccagagcctcctctctgctgagagctgaacactccacagatgaccagcctacagagaagagctatcaacagtgggtctcctctgagctgttctaacacttaataaagctcatctttgtcttgttcacccttcacttgtctgcatacctcattcttcctgaatgcaggacaagaactcaggcaaaggtgccaccagccacagaggtttctggccggaaaatcggaccccaatgatcccttatcaatagctcatgtagggcccacattaaagactatgaaagggatgcagttaccattcccatgtgccaggtgaagaaactgagcctcattttcttcaactgagaagaaatttgaccaaggccactcaacccaggtttgaacccaagtctgccttactaacccctatcttaactattatttgataatgtggtagttttttatttgtttatttttttattatactttaagttctagggtacatgttcacaacgtacagctttgttacatatgtatacatgtgccatgttggtgtgctgcacctattaactcgtcatttacattaggtgtgtctcctaatgctatccctccccactccccccaccccacaacggccccggtgtgtgatgtttcccttcctgtgtccaagtgttctcattgttcaattcccactatgagtgagaacatgcggtgtttggttttttgtccttgtgatagtttgctgagaatgatggtttccagcttcatccatgtccctacaaaggacatgaactcatccttttttatggctgcatagtattccatggtgtatatgtgccacattttcttaatccagtctatcattgatggacatttggcttggttccaagtctttgctattgtgaatagtgccacaataaacatacgtgtgcatgtgtctttatagcagcatgatatttaatcctttgggtatatacccagtaatgggatggctgggtcaaatggtatttctagttctagatccttgaggaatcgaatgtggcagtttttgattggtattcgctcacctacctgcaacatctgaacacacaaacacatttattttgttaagctgtgctcaggctccctagcaactgagaaaacaggcaagcacttttaaatgtgtgaacacaaaattcaagaagctcctgaatattgtccttgtctacaagatcttaccctttttaaacaagaaatttgggtatcttttctcactcactatcaatacccatttagctctttgttaattgttttaattagcttatcaattgatcataacaacaactgagcaaggatatgaaaaactcatgaagttggtattgcaactgtttatgaaatgtctcaacatattcttaccaatactgttagtattgttatttcatgtgttaaaaggagtagctcatcagtaatgcagggagcttaagaaggaagagtaagtcatctaagacactattgctgtagtataaaggtcatagttatttaaaactatggggaaaaaatgaattctctctgtttaccatcctgtctttatccttttgttctgatcaaaattggtcttcgtgttctgcctatttcttcattatacctcactctttcacctcttaaaagggtcaatatactgacaacatactaattttagtttactaagaccaaattgtaccaacccttaaaaacttactcaataacgctttggcataaaaaagtctgcagttgtacagaatgcacctatatggctgcacagggaacttgcacttttcatgtgagttgcagtgaggatcacatgccctcccaatgcaccttgaaccacattttgagaatcaggacttgaaggcttccaattatctactcattaacacatcaaacagcctttttctgttcacatttttcttaacctccagcagtatctggctctgttgagaaacctcttttggaacctctctactcctgacttcttccataacaccatttaccatgatgtttctctgacctgtctacaagcatagatatctgtgctgaaataaggctacctaacaagaaaagttgtaaagttgtcagcccatttttttgtctgactttttggtgccatatgttggtgttttagtggaccaagacatagcagctgtctctcctgcctgaaaaagacgtaggaactgggcctacagagatcaaaatgtcaattatattgctgatagagctgctgcatttgtgacttcaaatcacgaaagtgatattcttttatgactgcacctccttcaagcaaattttctcaccagtcacaggcagcaatggtaaaccacagcactctcctgcagggacaatgcctttgggcttactttaccacttgcaaagaacagaccagattatatggtctttacaggtaggcagaatcctaaaggaaagcacagacctgcacatgccccactatcttattccaaatgcaccagttacacaagtcacttttcctcttctagggagactgacaagaggaagaatccaggaatattattatattaaaactgctaccacacagaataaaacatcagggctggggaataaagcatttcctcccaatatcatgtaaaggggaaagccatagaaatgtggtagttatagcatcacatgaaaatggataaatatttgtatgatatgtgtaggtatatgcatatatattcatatatgcatatgtacattatatgatatatataacctatgtatcaggaaaaaaactaacactaaaaataccacaaccttatcccagcgtgatgggatacatgattatcccaaaataaataatccttatttcttttttctaatcattatattttataaattttctatcatatgcattaactatataattagaaaggtaaattttaaaactctcaaattaccaagaaatgggcactaacactggatacatttgaatttaatttacaaccaatatagcataaaatatatattgatattgcctactaaaagtgagtttcagccaggtgcagtggctcacgcctgtaatcccagcgctttgggaggccaaggcaggtggatcacaaggtcaagagatcaagaccatcctggccaacatggtgaaaccccgtctctactaaaaatacgaaaactagctgggcatggtggcgggcacctgcagtcccatctactcgggaggctgaggcaggagaatcacttaaayccagtaggcggaggttgcagtgagccaagattgcaccactgcacttcagcctggcaacagagcgagactctgtcttaaaaaaaaaaaaagtgagtttcaaaaagttgatgagactaacttttgattttgctccctcttaaatgttatagtagtcaaagtgtcagagacatgttaattctaaatagaatacaaattatgctaaatcaattctgtgtgttttttaatgattaggtattacaggtaaactaaattgaacataccttcctcaagcacgaggcctgggtttgttaccctttccaagcctatcatataactcagatgctttcacttggtaactacagtgttggttatcatgactcatgtgttccttcattttacaagaatttattaaatacctactatgtgccaggcactgttttgggtcttgaggagacagcagagaaccagactgacatggacccgcaccaatggagcccacattttgtaaagtgagaatatacaataaacaagtaaacaagaaactgtcagatagtgataaatgctatgaggaraagaaagcagggtgatctgatagagagtggtcaggctgggaaggcctctctgaggaagtgatgttaagaccgagctgaacaaccagaaggaggcaccacccaataatcttgaacacttccccaggcagcaggcaggtgcatgccaagcccataaggtaaaaatgagcatagctggcttgaggaactggaaaaaggacagagtgccttgaaaaaggtctatgagatgaagctcacagttaataggagccagataaagcagggccttgagagcccacatgatggaatttaactctaaacaggatagaaagttgttgcaggattttaagagagaaacagaagctgaactcctgaaagaaaaaaaaaaaaaaagatttaaaaatgaatggagggttgggcagggtggctcacgcctgtaaacccagcactttgggaggctgaggtgggcggatcacctgaggtcaggagttcaagaccaagtggccaacgtggttgaaaccctgtctctactaaaaatacaaaaaaattagctgggtgtggtggtgcatgcctgtaatcccagctacttgggaggctgaggcgggagaatcacttgaacctgggaggtggaggttgcagtgagctgagatcgtgccactgcactccagcctaggcaacaagagtgaaaactctgtctaaaaaacaaacaaaaacaaaaatgaatgcaaaagaccaagaaactataaacacaagttttgtgtcatctcctgtctgatgcaatcaagacagtccatgtcttgtctacaacaatcacaaagaataaattgacagaattcagaagtgaaatgatggcagtaaaaaaaaacattagagaaattgaaatcacatttaaaacaaaagaaatagaaaagattctgctgaaaaaacataaggacagagtgcagacctcagagaattttagctgaataaaaacatacaagtgattagagaaaataagcacataaaataatgtgctgagatagaaagatgaagaatatatagttgcataattagtgtctttgaagatgagaccaaaatgtttagatgaaaaatcattcaaatgcataataggagaaaatattactgaaataggctctggaatctgtagactataacggcataccacattacaggcactatcaacccaaagaaatatcctggtgaagttttctaactttaaagataaagacttctatgagatgaggggtgggaaaggcaagacagactagcctcaggccacagtatttttcacagcaactctcaatgccagaaggcattggaaaatagcagcagagttcaaagagaaaaaaaaatagaaataaagattgaatcaggggtttaatatccagccaagctgttatttattgttaaaagcaccacaaatatattcacaaacatataatgcctcaggaaatagagcactcatgagcctcacttgaaagaagcgatttgaaatgaaacccaactgaaaaacagataaatcaaaatatagaattcaagaatggtgacatccttctaaaaataaaagactggtcatgagcattgaatccatttgaatatataactatcactatagaactgtagaaattatggtttcagcatatattcattggcataaacagtgttaacacatacccatatcttagtggcttaacacaataaaaatttgtttttaactcatgtcactatttaatgtgggtttctgagtgggaccctcttctccacgcagtgatctgggggctcagatgtcttcctttgtgtagctccaccatttttaatgcagttttagggtgaccctggacccatccagcttgcagacagaaggaagaaagagagggtggagaaggcatcctcattgttaactgcgtaagactgaaggtatcactttacttttacttatcttgatcatggagaattctgggtagtctctaatacacagaatataatgtcaatagcattagatataacaatatagaaataataatataattacaaaaactgggaggttatgagaattggtgggaagagtggcatattttctcatctttcatagcagaagttaataaatacttcctaaattttataaatcaagaaataatggcttaaatatattttcatgccttattttatgttataatatagacatgggaagaaaaaatgtagaataacaactaaaaacagacaatatagcaaaagacagaaaaccaaggaagaataaaaacaaaaaaacataaaatagcaaagcaataaaacacatctaaatctgttgaaataacagaagtgaatggaataaactaatctgttaaaaataagaaattataagaatcaaagcatgatatttgatgatggtatatattataaatatagaactctatctcagatatattagtgaaaaaagcaagttgtggaacaaaatgtatagttcaatcctatttgtatttaatagtaatatatattatgtatgatatatacatattgttttataccatgtacacatagaaaatatttggaagtatacacaagatatggttagcaggattatttctgcgrattaggatgaagggctaggaaggggaagcatattttcactttttaccatatatccatctgtaccttaaattttgttgtaataagcatgacatttttataaaaatgtaaacaaaaaatcctaaagtccaacacagtactactggagaactgaaaggaacaacaaaagaagggggagaagtcagggaaggctggcagaatggtctttgccaaccatggatcttgaattggaatctttaactcttctacctggagttaaagattccaggtagcaaaaaggctgagtctccaaggagaagaaagagcccctagcactgatcccggtgtgcgctaacaatgtgaaaaggacatggcatgtttaataaaccttagggatgcctggagtatgacatgtgtggtggaaaggtgtaagaggttaagactggaaggacagggcaaatttggtgaatggaggagttaagatcattcattagaaaatgagattttttcagagtattttgaacagaatagtagcttgattgggatagcattttacacagataactatgatgtccatatggggaattaattagagaccacagaaaactggcaacccattaggattctagccaaatagtccagttagtcatggtgatgatctgaactaaaatgatggaaatatagataaagaaaatatgggttcaacattcaaggactatttagcaggtagaatagacagaacttgactattcattggatgtcgtggtggtggtgtaaagaataaagaaagaagagtcgggatgatacccaaatatgatagctcattccattatgtgaatgtagaaagagaagcaaatttgattgtggataggaagaaggagaaaggtaagttcagtttgggtaatgttgagtttgaagtgtaagtgggacattcaggaagagggaagcaggtgtaagaccatgagaaaggtggaaatgtgtaatatagaaataaaaataattaatctgtaactaatagcagaggacaagtgcagagaattgtgagaagggaaggggtgaaagcataaaatgtctctaacaggtcagcgttctctactcagttcaaaggcataaacagagaaccttttgcttttattcctggaaatctcttgccattccaactccttggccaagaatggagttaaagattccaggttaaaaaaaaaagggttggggggcacatttgagttagaagtggatggatttcttctagcaagcttttggtccaaaaggaagctttggtccttttgtggctgttgggaattgagacagcacttctctaaggagccttgaggcatctcttaggaagaaagatggacatttgtcctttgcccactaactggaccactgggtgtggtcctgactcttactgggtatgaccaaatgaaagtccaggctgcctaataacttcaggaggggactaactgcctccctgctaggcaaaaataattcaattatcctttacaaaataaatagctaaaagctaatcacatacttataattcaaacataatgctggtacctgaaagtgctacatttcatcaatcctatcacctcaacttgtacctaaggcccataggctttaactactttggtggacagtctgggaaccaaagaaagaaagtcttgtcataaaatattatttcctttgtggaggggaacagtagtggggaactgacaaaggaatctaacaagacagaggcctggtatatttaaatataggtagaattggaagactttgaattttgtatgttttttctgtatgtttatatatttgtaataacaataaaaatactcaattgttcttatgtagtaactctatgaaattatgtactgttgtaaagtggcttaccatttgcatttggaaagaacattttaatctctttgaaattaaaatgttaaatcatttgtatgttaaatgttaaaaatgaccaaatgggtttagcatccaaacaaaaatatatcgcagaatgttgtacagcaacttgaaagctgttgccttgttactgctgtgaaaatttatatcctgtcatacttgttatggtttcacataataggatgaggagaggctgtgcatttctagcatctatccagacagaaggaggtagcatatatcttctaactatataaagtcatatattttttattttgtctgaaataaaattcccatttttatctagaatcctttctttttctcaaattgcactcatatataatgcctggcatatattaggccttcaaatacatagatatctgtttgtactatattttagcatcactatttttatggggaagagtcagaaatctgtgcatgctctacaaaatccagcttttctcagacaagcagagaactgaggaaaatcattcaaatgttttgatgcaatgaaccagatgatttcaatttcaactaattacttcaactcacttcttcactrtagttgggtagtctaaatttctgtttcaaatgtacagcttttgtacagctttcatatttttgcaaagttgcctttttcagtgatttttaaatctttagttcccatttcacttcccatttaccatttcagtctgaaactgtaatactgtttccacagttacaagcctcaagttaatcatgcctctgggaattgagttctgcagtgtgtacacaacccccttgagggggcttgtgggttcccagcatagacaattggctccaaatcctgcctctggggattcaggcacactgtgtgccagctcaccctgcctgacaaacactgctggtgagacagaggttactcattcaccatttgagaaaactaaggaatccatctttggccttgcaagggaagggtagtagacagagtctccaatacagtgtctcatctttaatggcagcttctgtagtctggcagagatgaaaacaggccacggatgaaaggaagcctctgtttctcaggatgaccaggtgtactgagtttttctagtctcccaggtatgccaggtagatgcgtatattgtgcttaacagtataatgctactttcctgatcactgcatttccaaatcctacttgtcctttaaggttggcttcaagtcttactttctgcattaaaacattctgttatataatggatgcatatttaggctattaaaaatacagaaaataatgtagcaaacacttgtgtactattagatgctttttatttaataaaaacatattactctctagaagaagataacattctgttaagagagaagccactttcttcaggtctagtaggaattgctttctgtgacatgctgagaaattaacctggaacagaaagatctatttcaaattgtgtctggattcatgtacctcttttatttttgcctcaccaagactttaccactgcctttacccatgatatgctccatctgccaagccacctctggaatagaattatgcttctaatggaccttcccagcctcccaaacagctctccaaccaggaatgaacacccagggaaccagttgaacttcctacttgtattgactcagagcctaaaagaaaacagaagaaaatgtgcaaaattactaaggttcttggtcaattctctggctacaagttagcagcttctttcctcagaattctgactttctcctcgttaaaggtggaattacatcccacctcaccaccaccccagaattcatatgttgaagttctagccttccagtacctaagaatgtgaccttatttgaaaataaggttgttgtaggtgtaacaaaagttaacaagaggtcttattggagtagggtgggctcctaatccaatataaggaggcccttataaaaagggaaaatttggacacagacactcagagggaagacgtgaagacacagggaggagaaagccaagtgatgacagatgcaaagattagagtaatatatctgtaatccaaggaatcccaaggattgctggcaaacaccagaagctagaagaagcaaggaaggattctcccctacaaatttaagagggaacatggccccactgacactttgattcagacttccagcctctagtatgacaagacaagaaatttctgttgttttaagcttwaaaaaaaataaagtaarataaattttaagaaattttaaagtgttactgattgtgtttgatatagctttctatatactccaacatcattcttatttctcctccccagaagcaaattgttgcctattactgggctctcttaggtagtttttttcaatgattctgcccttttctggatcttaatttttcacaaggagtccagttaacctaaattaaccaaatcttagggcccctacctccatgcaagcattgagagaccctaaggtggaaatgcaggctggagctttagctgggcccatcatcttgactgggaaccctatacctcttttgactttccaaattctctctgattcctatagcattgagcatttaatccagtttccaatcacttatttattacctacttgcaggtacaaaatagagaatatacttgcaggtaaaaaatagaggatatattatggtatttccttwtgagactataaatccttgaaacagtattaatctctttttaaagcaagctgagggaagttcccctaaagagttcctactctataggagattgcacatgtaaaccaatctcgttattagagaagtgtgtactcagaagtatgcctagctttacagaacaggtgatgttgcagccattcaatagttattgatagcctactatgttcaaattagtgaattaagtattataagaataaaagaaatgcataaagatttggtttccctaccttgagtatctctcaaatgattaatgatgcatttttgaaaatacatacagtaaactacttcatggtttcagtgtagtaatcatgctggggcttcaatgagggttattattactactatgataattatgatattatcataatttgattttattttaggaattctttaatatttagattttttcctaagcaaacctgaaagctgagtgtttgcccaaacaactgaataagaattgtttatcttagaccaaatcatcagtaccactggcatttttaccagagtttgaaaatgtattcttgcacctcattcttttgccttgcactggcagcaaatcactatgtatagaaactgccaagacaggccttatggaacttacacagcatctttctctctgtgacttgtatgaacacaaattgaagatggataactgaaatacacttggccacagattccattctgtcatctggaactaaactaaagcaaaattattcaaggcacatttcaatgaaattctttatgaattgaccattaatttgtgctttttattataactagacaaattgcwttattatataatataccatcttttwaaaaaatcaacttttattttagattcagggggtacatgtgcaggtttgcgacatgggaacactggatcataacactgagatttagagtgcagatgatcccatcacccaggcagtgagcacagcacacattaagcagtccctcacccccttccctccctctctcctctagcagtctccagtgtccattgctctcatctttatgtccatgggtactcaatgttcagctcccacttataagtgagaacatgcagtatatggtttcctgttcctgcattactttgcttgggataatggtctggctgcaaccatgtgctgcaaagaacataatttcattttttatggctgcataatgttccatggtgtatataatacatctttttatttttatttttttttaatttattattattatactttaagttttagggtacatgtgcacaatgtgcaggttagttacatatgtatacatgtgccatgctggtgtgctgcacccgttgactcgtcatttagcattaggtatatctcctaaaactatacctcccccctccccccaccccacaacagtccccagagtgtgatgttccccttcctgtgttcatgagttctcattgttcaattcccacctatgagtgagaatatgcggtgtttggttttttgttcttgtgatagtttactgagaatgatgatttccaatttcatccatgtccctacaaaggacatgaactcatcattttttatggctgcatagtattccgtggtgtatatgtgccacattttcttaatccagtctatcattgttggacatttgggtggttccaagtctttgctattgtgaattgtgccgcaataaacctatgtgtgcatgtgtctttatagcagcatgatttatagtcctttgggtatatacccagtaatgggatggctgggtcaaatggtatttctagttctagatccctgaggaatcactgacttccacaatggttgaactagtttacagtcccaccaacagtataaaagtgttcctatttctccacatcctctccagcacctgttgtttcctgactttttaatgattgccattctaactggtgtgagatggtatctcattgtggttatgatttgcatttctctgatggccagtgatggtgagcattttttcatgtgtcttttggctgcataaatgtcttctttcgagaagtgtctgttcatatcctttgcccactttttgatggggttgtttgtttttttcttgtaaatttctttgagttcattgtagattctggatattagccctttgtcagatgagtaggttgcgaaaattttctcccattttgtaggttgcctgttcactctgatggtagtttcttttgctgtgcagaagctctttagtttaattagatcccatttgtcaattttgkcttttgttgccattgcttttggtgttttagacatgaagtccttgcccatgcctatgtcctgaatggtaatgcctaggttttcttctagggtttttatggttttaggtctaatgtttaagtctttattccatcttgaattaatttttgtataaggtgtaaggaagggatccagtttcagctttcyacatatggctagccagttttcccagcaccatttattaaatagggaatctttccccattgcttgtttttgtcaggtttgtcaaagatcagatagttgtagatatgcggcgttatttctgaggtctctgttctgttccattgatctatatctctgttttggtaccagtaccatgctgttttgtttactgtagccttgtagtatagtttgaagtgaggtagcatgatgcctccagctttgttcttttggcttaggattgacttggtgatgcgggctcttttttggttccatatgaactttaaagtagttttttccaattctgtgaagaaagtcattggtagcttgatggggatggcattgaatctataaattaccttgggcagttggccattttcatgatattgattcttcctacccatgagcatggaatgttcttccatttgtttgtatcctcttttatttcattgagcagtggtttgtagttctccttgaagaagtccttcacgtcccttgtaagttggattcctaagtattttatattctttgaagcaattgtgaatgggagttcactcatgatttggctctctgtttgtctgttattggtgtataagaatgcttgtgatttttgtacattgattttgtatcctgagactttgctgaagttgcttatcagcttaaggagattttgggctgagacaatggggttttctagatatacaatcacgtcgtctgcaaacagggacaatttgacttcctcttttcctaattgaataccctttatttccttctcctgcctaattgccctggccagaacttccaacactatgttgaataggagtggtgagagagggcatccctgtcttgtgccagttttcaaagggaatgcttccagtttttgcccattcagtatgatattggctgtgggtttgtcatagatacctcttattattttgagatatgtcccatcaatacctaattcattgagagtttttagcatgaagggttgttgaattttgtcaaaggctttttctgcatctgttgagataatcatgtggtttttgtctttggctctgtttatatgctggattacatttattgatttgcatatattgaaccagccttgcatcccagggatgaagcccacttgatcatggtggataagctttttgatgtgctgctggattcggtttgcccgtattttattgaggatttttgcatcaatgttcatcaaggatattggtctaaaattctctttttttgttgtatctctgcccggctttggtatcaggatgatgctggcctcataaaatgagttagggaggattccctctttttctattgattggaatagtttcagaaggaatggtaccagttcctccttgtacctctgttagaattcagctatgaatccatctggtcctggactctttttggttggtaagttattgattattgccacaatttcagatcctatttttggtctattcagagattcaacttcttcctggtttagtcttgggaaagtgcatgtgtcaaggaatttatccatttcttctagattttctagtttatttgcgtagaggtgtttgtagtattctctgatggtagtttgtatttctgtgggatcgatggtgatatcccctttatcattttttattgcgtctatttgattcttctcttgctttattagtcttkctagcagtctatcaattttgttgatcctttcaaaaaaccagctcctggattcattaattttttgaagggttttttgtgtctctatttccttcagttctgctctgattttagttatttcttgccttctgctagcttttgaatgtgtttgctgttgcttttctagttcttttaattgtgatgttagggtgtcagttttggatctttcctgctttctcttgtgggcatttagtgctataaatttccctctacacactgctttgaatgtgtcccagagattctggtatgttgtgtctttgttctcattggtttcaaagaacatctttatttctgccttcatttcgttatgtacccagtagtcattcaggagcaggttgttcattttccatgtagttgagtggttttgagtgagtttcttaatcctgagttctactttgattgcactgtggtctgagagacaattgttacaatttctgttcttttacatttgctgaggagagctttacttccaagtatgtggtcaattttggaacaggtgtggtgtggtgctgaaaaaaatgtatattctgttgatttgggatggagaattctgtagatgtctattaggtctgcttggtgcagagctgaattcaattcctgggtatccttgttaactttctatctcgttgatctgtctaatgttgacagtggggtgttaamgtctcccattattattgtgtaggagtctaagtctctttgtaggtcactcaggactggctttatgaatctgggtgctcctgtattgggtgcatatatatttaggatagttagctcttcttgttgaattgatccctttaccattatgtaatggccgcctttgtctcttttgatctttgttggtttaaagtctgttttatcagagactaggattgcaacccctgtaattttttgttttccattttcttggtagatcttcctccatccctttattttgagcctatgtgtgtctctgcacatgagatgggtttcctgaatacagcacactgatgggtcttgactctttatccaatttgccagtctgtgtcttttaactggagcatttagtccatttacatttaaagttaatattgttatgtgtgaatttgatcctgtcattatgatgttagctgattattttgctcattagttgatgtagtttcttcctagtctcgatggtctttacattttggcgtgattttgcagtggctggtaccggttgttcctttccatgtttagcgcttccttcagaagttcttttagggcaggcctggtggtgacaaaatctctcagcatttgcttgtctgtaaagtattttatttctccttcacttatgaagcttagcttggctggatataaaattccgggttgaaaattcttttctttaagaatgttgaatattggcccccactctcttctggcttgtagagtttctgttgagagatccgctgttagtctgatgggcttcccgttgtgggtaacccgacctttctctctggctgcccttaacattttttccttcttttcaactttggtgaatctgacaattatgtgtcttggagttgctcttctcgaggagtatctttgtggcattctctgtatttcctgaatctgaatgctggcctgccttgctagattggggaagttctcctggataatatcctgcagagtgttttccaacttggttccattctccccgtcacgttcaagtacaccaatcagacgtagatttggtcttttcacatagtcccatatttcttggaggctttgttcacttctttttattcttttttctctaaacttcccttctcgcttaatttcattcatttcatcttccatcactgataccctttcttccagttgattgcatcagctcctgaggcttctgcattcttcacgtagttctcaagccttggctttcagctccatcagctcctttaagcacttctctgtattggttattctagttatacatttgtctaaatttttttcaaagttttcaacttctttgcctttggtttgaatttcctcctgtagctcggagtagtttcattgtctgaagccttcttctctcaactcgtcaaagtcattctctgtccagctttgttccgttgctggtgaggagctgtgttcctttggaggaggagaggcgctctgctttttagagtttccagtttttctgctctgttttttccccatctttgtggttttatctacttttggtctttgatgatggtgatgtgcacatgggtttttggtgtggatgtcctttctgtttgttagttttccttctaacagacaggaccctcagctgcaggtctgttggagttttctagaggtctactccagaccctgttttcttgggtaatagcagcggtggctgcagaacaccagatgtttgtgaactgcgaatgctgctgtctgatcgttcctcttgaagttttgtctcagaggagtacccggctgtgtgaggtgtcagtctgccccttctgggggggtgcctcccagttagcctgctcaggggtcaggggtcagggacccacttgaggaggcagtctacccgttctcagatctccagctgcatgctgggagaaccactgctctcttcaaagctctcagacagggacatttaagtctgcagaggttactgctgtctttttgtttgtctgtgccctgcccccagaggtggagcctacagaggcaggcaggcctccttgagctgtggtgggctccacccagttggagcttcccggctgctttgtttacctaagtgagcctgggcaatggcgggcacccctcccccagcctcactgctgccttgcagtttgatctcagactgctgtgctagcaatcagcaagactccatgggcataggaccctccaagccaggtgagggatataatctcctggtgtgccattttttaagcccgtcggaaaagcgcagtattggggtgggagtgacccgattttccaggtgccgtctgtcacccctttctttgaataggaaagggaactccctgagcccttgcacttcccgagtgaggcaatgcctcaccctgcttcggctcgtgcacggtgcactgcacccactgtcctgcgcccactgtctggcactccctagtgagatgaacctggtacctcagatggaaatgcagaaatcacccatcttctgcatcactcacactgggagctgtagactggagctgttcctatttggccatcttggctccacccctataatacatctttttaactaataccatttaaaatttcacatgcaatgttcctataattttatttctatcaaaaatgcaataaagcattattagtgtaaacttagcagagtcacagaaactgtggtcagtcatgagtcaagaactgaatgtcgtgaacttattaatacttatttggatgtattctatacatctatacaaattaatactataatttggatttatttttgtccttattttctagacactgcaaatggatgtaaacaagctgaacataaccttgcttcggatcttccgccaaggagtggctgcagctttaggactcttaccccagcaagtgcacatcaatcgcctcattgtaagatacccacatttcgcatttccaaaattcaagccrtgtgtgtggtttttttaatcactaaagggctcatgctatagttgtatggctaatgagccaaatccggcacgtcatgtttttgcaaataaaattttatgaaacaagctatatctgctcatctacccattgcccatgrtgccttttrtattacagtggcagagttcagtagttgcaaaagattggctcatgaagcctaaactgtttatcatctggccctttatagaggaagtttgttaactctgtcatagttcaagtctaggtcctgtggtaaatatgaaagagcccaaaacacttgccttaccaacctgacactactccgaaaatattctccattagagtgaaagcttctatatcaggtaaggcagtttccagacattattgatatactttcaagtatatcaggtgaggcagtttccagacattattgatatactttcaagtatatcagtagaacaatggacattgagtgcacaaggcagggcattttaaataaagaataaagaactgaccctgaggactgcagcccaggtggaatgcaggaattggtagtccaggaaaaccaagagaaaacttgaatgggcatctgagtgggtaaagtaaaaaaaaaaaaaaaaaaagtaaacccaaaggatctgttgtatagggcccagtctaggcctatatgtcaatcacccacatccattatttcctctctttcctcggtgtttgggaacctggatttcatgcaactacatgttcccatctgcactggaaagtgggcgtgagcaaaggccaaaaaaaaagtaaattcagatcagatgactgtctttctgtaaaaagctagtcacctcagttttatgtgaaaaggaactttgggatcactgtacaggttttaaattgctcttaatgtccactgcaatgggagtctaagcaaggactccatgttcccccagccttaaattgctgtgcttctgctgcatggagctcagctttctattgcacccatctgcattcactatggagggaatttgctttttgttttggtttggggtttatgtttctttttattttttctgtgtgtagagagtgagttgtttcatttcttcataaaaatttgtattctgtgaatcaacaatgttctagaagtaaacaagctkttaaaaagttttaactcataccacagaagaagaaatacaacattcccctgaatgagtgaaggttacccggtggctcacgcctgtaatcccagaactttgggaggccaggagggtggataactggaggtcaggagtttgagaccagcctggccaacatggtaaaaccccatctctactacttaaaatacaaaaaattggccgggcatggtggcaggcatctgtaatcccagctactcaggaggctgaggcaggagaatcacttgaacccaggaggtggaagttgcagtgagcagagatcactccatggcactccagcctggacaacaagagcgaaactccatctcaaaaaaaaagaaaaaaagtcttggatctagatctagattttttatatatatacaatatatacatataaaaatatatatgcatcaacctgtgcatatatattttgctaagatatatagagagatgatatagatatcttagatatacttttatacatattaggtttaatgagcataatagctgtttgcaagggtgaaggagggatttgccagactgaggaaggaatatgcttatcatatcctcagagaatgttagtagcatggttcaaagtagttattataatagctagagttacaatacctgacatagcaaagcatgttgattagcatcatgtgttttggagacagacaaaaccatacttcatttccagtgtggccatattccatgtatgtgaatgtgggcaagcctcttacgttttatttgtaaaatagagataaccataatacctatcgcttagcggtgttttgagcaataaatgagataaaagatttaaggtaaatagcatgttaggcacaacacaagtgctctgtacctacagtagttgttattgggtcacaaactatttaaattgttataaacatgtttcacatcagtatttagttattgtctgttgttctctgcaaacatgaaaaaacttttactggcttgctagtagtaaactgatacttcattttataccagctaaaattctgataaagcacattaaaagaaaactttctagcatgagagctctccatgtgtcagaaagaaagctaagaataatttccttctattagtgtgttgtgtaagttgtgaaagataatattatcaatcgccatggttttgtctgctctctgtgtgtgtgtgtgtgtgtatgtgtgtgtaggatatcagacatttatggtaagaaattctctgactccatttcagctaatgaggtaatactaataggaaaagtctcatgacatcactacataagatatgcatttccaccaaatgaccaattttaaatgtgtgacatatttgaygtgaagaacagtatcaggaaaaggacttcaaagatcatctggcaccatcttctttagctagccaagccttcacattaacacaagttataaaaataatagagagagtggtgatgtctaatatgtaattttgtaattttactattactttggactttaattcatttgattttaaaatgcttctttaaacataattactcagggaacatctgaacaatctacatcaaaaaattacaatatggaatggtaaatgaatcagcatgcaagcatgcactgaaatataaaattacaaatcttggggggtggcaactaatggcaagaaagctatttgaagattttagactttggactggtaacattaagtctatcagagaataactaataaatataatctccacaaagccttttaggattctagaattctgacttcctttaatgtttctaaaggacaggtaaaaatattatccaaagttgtttaaaatgtctataacaaatacaaatattctgcttttattagggaaagaagaacagtattgaactgttygtgtctcccataaaccgaaaaacaggaatttctgatgctctgccctctgaggaagttcttcgttcacttaatatcaatgttttgcatcaaagtttatcccagtttggaattacagaagtctctcctgaggtatgttgttgcacgaaacaattcatttaaaaatgtgaacagttagcatgctatggtaattcaaccccaagaggctttgagatggaagttgtttattgtatgttatttgataataaaaatttccctgagtgtcagaattctctgrtctttacattgtatatgtttacttcttaaggaaatgcactttcacattaaggttttcactttttggcatttttcttcttcaaacctttgtggccttataacttattttgacttatccagtaaattttctagaagaaagaagatttagatgtattttgtcaattgatcgcttgaaactgatatgtcaaataaacaaaaatacatttaaacctttctttctctacaggtgcacccctcccctcattgtcgtcattgtcaaaatggtcaccagatattcgccttttcccataactttgaaattaatttgaaatgtgatttttctttttctgaagaaactatagttttttaaagaacttaagtcttaagaactatagatgtttcttcatagtattttccaaatttgtcgcttttaaaaaatttcctctaccacctccaccatctcactcctgaatggatttaatttcctttccaattctattactccatcccgctctaacaaacctactgaaaggatcatcatcctaaatacgtgtaattcaattcatggaatcatgaaattaaactggagggaatatgtgtaacaccttgtagatacagaaagtatggcccatagaaattaagtgactccctcaaggtgacagaacaagagaggcgtaaagcaccacctaagatctaggtgtcttttttttctctcttatagaggcagggttttactatgttgcccaggctggtcttgaatgcctggcctcaagcaattctcccaccttggcctccaaaagtgctgggattacagatgtgagtgagccatcttccctgtccaaaatctagatgtcctgatccctggtctattcacctttacagtaaatcacactgcctctcattttagtatcacaggtgtggtataaaaagctctgggtgggcatggtggcttatgtttgtaatcctaactactggggaggctgaggcagcaggatcacttgcacccagatggagtttgtatcccaaagccacacgtaaaatgtgtgtgaccatgggcaggccatttaatctctgtgaggttgtctgcctttgcatggtatcaacctccctgagccttagtttcttcaaatccaaaatgggtatagcacttataaacttgaaatatggattgaatttttaaagtatatgcagaaattctcacacagcctaggtagcagacaaatgtaatttgaatgcaggatgacttggcacaatgagaatatatgtcatcattgaaccatcactgtcacaaccacccccaactggtcttcctgcatttggttttgcgcctctctctgttctgtttccaaacatacccaatgtgttttctttcctgccaccaaagtaatctttctcaacataaatttggccatgccctcctaatttcgtgattcttctctggctttcaaaatactacggaatgaagtctagatttcttaatatggtatatggtcctttgtatgctgggctttataattgttgaacaacactttcctagtttacatttcagcaattytaaactcgatagatctatgatacaccatattctctccttccttcatgcttttgtatgtgttgtttcatctacatacctttcgtttgttttttttttttkttttttttttttttaagacggagtcttgctctgtctcccaggctggagtgcagtggtgcatctcggctcactgcaagctctgcctcccgagttcatgccattctcctgcctcaaccttctgagtagctgggactacaggcgcctgccaccacgcccagctaattttttgtatttttagtagagatgggatttcaccatgcatacctttcatttcttaagatcagtctactgtgtagcaaagtatcccttgtacctccacagacgaagatgctccttaccctgtgttcccgtcaagcttaaaacaaaaactccttattccatattagtctttaggctcatctctacactgtgggttttttgagagcttgtgacatgtcatttgatctgkgtcttcattgccttcatttagtgcctggcatgcratgggcacacaacaaaactgagtcaacaaatagtcatgctgggcgcgttggctcaagcctgtaatcccagcactttgggaggtcaagagaagaggattggttgaggccaggagtttgagaccaacctgagcaacatagcaagactctgactttacaaaaaaagttaaaaattagctgggcatggtggtgtgtaactgtggtcccagctacttgggaggctgaggcaggaggatcacctgagcccaggaatttacggttgtaatgagctatgatgaggccactgcactccagcctgggtggagtcccaaaacaaacagacaacaacaacaacaacaacamgagcaaatagccaagtactgtgctagctaatatctaaagccagaaaaataaataaacaagaaaacaaacaataaatgatgyttgttctcaatgaatttatgcactaatagggcaaatacgacacaaagagataataagaatatagttctatgaataaagttactacactgtgccatgggtgccttggagaagagaccccttatgctttagagaggccagaggagagggtcaggaggaggtgaaccaccaggcccctcccagccttgcccacgtctgaatctgaagcagttccgcttgtgcacaaagccaaaccccrttcccacagtcaaggccctacacggactgactggtacacatcttgcctaggacaattctttaaattttagaaagaccgttggataaatgtatcctgcttcccataagcttttagagaatcatgtaaacggccttccctgttgctttattctcagtttaaaagccattctgaaggctttaagaatagagcaacttactgagtcactcagatttgcaaaccaaaagaagctccctatacaaaaagagctggctttaaagcaagtacctgggcatcctccaatataccccagtccagtgaaggtgaggtacttagcttaatggcctctcacagagctactagctcacaatagactacatttgaataaggaaagtgttttgatgataaatgtgatagattctcataaaattgttggaatctagaaatctagaatttagaaaatatgcattacagaagatgaggaagtatttgaatcagatataaggagcatatcatgaaggacrgagggattatttgaacyttttgtttgagtactcctagaaggggccaggcattaccctttgacctttgaccagaatctctaaatgcagaaacagggaaaagctgtctgtagtgagcaggcaccccagtggggaggtgcttggtacagatacaacctaaagaagccctgcaaaaatattgattgatagttgcttaaaactggtaaatgctattctgtgagttttcttacaactttattcattttktctgtggttaatcttttatarcaacttatacctcaacccattttttcacattttaatcttaaaattataacatgttatggcaacatattcattaacagaaaaaaaggatcactggtattttggcttttcatcctttgcatgaattatagaacatcgtgaatgatgtctcaaagcatctattcctaaacttacgttaattactttcatggaaggatatggttttttattgttttttcatatgcttgattttttaaattgaaaatgactcttcagaaacaaaaaaacccaactagaaaactgttcttgtttagtcatttgttttcatttgtaatctgtttcttaaaggaaaagacattatttcytttatatatttgtatatgatatctagaacattataggcactcatatagataaaactagacctcctcttgcctaataagtaaaatcccaggaaaataaaattaaatgtttttacaaaatgaattaaatacctattaaaacggtaagttctgtgttgacatttttaaaaatgattcaggaattttgttgttgttcaattgcaaattactccagtttccaaatcttatatttcaaaggagaaagtgaccttctttaaataaaagtccaatgtgctaactgataccttcatgaaatatttacaaagaaaaaaagccattacatacaaatgtaaacaataatgtgtgagtttaatgattattccttcaaactaggaacactagcaggtagtcttgtctaaattagtgtagacctagccatacagtgctgaggagacatacaatcaatattaacctgtattcgaccattcagaacaattgctcacattgtgcacagtacagtggaagcttggcatttatccaacaaagccatattgttataggatacatctcatttatctgccaagtcaatcaaattaaccagatactttgtaacatttgcacttcattcttattctgtgtacttcctctctcttaaagaggtgtatctcctagatcctctgtatctctgaatcgtctctcctagcatttgggatctccttctgcatctgagatcagaattgattaaaatatttaaaaagaaaggacaaaagaaagaagaatgagctatagtgcatcaaattattaaacaggatatagagaagccattgttaactatacagaaaactgaccaaattttaaataatagaacaaaacccatcagcttctttcactgcaactaagttaaagggcaaagaaatgtagctatgaaataataaaacataaagatgatatagtggcattggcttgacccaacaacagagcctctgaattattcaactctcggccacctgacaaaatataaaaagcatggggttaaccctatgcaaaggttagattgaagattcttgtgaattatagtcttttgatttgtgagctcttaactacaaacttgtccatttattaccctgcccttatcaagttttttagatctctgtacaaatatagtagtgttcagcaggagtagcatgactcagaaagaaatctatttaccaagaaagtgcagtgactaagttctaggagtttaaaacgtgtctttctaactgggagtgggggatgggagggtgggagttaattctttcatcattactgcttcagttaaaaaagaaaacaaaacaggtttgtcttaagcagaaaggaacatgttgatattctaggagttgtagaactacagcaagaaaaaaaaatgaaccaaatcgggttaggaacacaaaatctctttccacccacctaaccacccctttttatccaaattttacatgggcttaagctcaactccttatacttaaatttgacaaatttatgctgcctacttgaaggcttaactagtttgcttttatagcaaacaatggatgctattttgttgcctgtaaaaaattcatttccatatttatacctgatttctgcaagagttttctattagtttccagctatgcttatagagacattggaatttaaaaaaacgatatggctgacgtcaaagaggtgaaagaaaatttgtcgcttgaacccaaagttgttttgcagcagggtacttggtttctaatcattttatcaatcaagtgttttcagattctccatcgatttatcatttatatatctttaaaatacatacctaaatcatttcttgtatctatgcatctatctatgtcttagaaagtaggccagatactattctactataattagtgagcacatcgctgttttacaagtaaagaaaatagaatcctgattacgttagcatttaataaaggctttctccaaataatttttgtaatcamaattgaactcaaaaatcttttctgttcagccttgcttatcttcccaccaaaacacacttgcattccagaatgaaagttctcataaaatatttttcaaggtaaattttttgtctgatttataaatgttgggtatattttattttttaaaagccttaaaaataaattagcaatgatttcaaagttcagacacctacaagacgtgttttactccaggccttcttaatcactggaaacaataaccaaggacagacatgtactctcactaaaggsaataaaaaggcacccttcaacaaaatgaaattttagatgagttaaagcatttgacttgatttagcctttatatgtttttcccaatcatggactatttggtttcaagttagtttcgttaactataaatctatactgtcactaaattatacaactgaattttaatctaagaatggattttagtcaatgtgcttctttaaaaaaattaataaaataaaattaatagagtcatgcacactttattcatgcttcttctctgctcttccacccccaaagtggaacaaaaatgatacaaataaagataaacctgtgtattctaccttttattgacaaataattctgaactttttaatgttccgtattactttagaaaaatakgtgatattctaacaatatgtattcttgagatgatattttagtcaggttttgacagcagagactctatttgaaaaaaaaaaaagatgtgattaaaagaaagaaggaaataatgctggcattgttgctgtatttattaatgcaccacaagcttttgtttgcacttgtttcacttttgtttaaaagtaaagaggtagtacagcacgtaatccagggtgctgatgttgtgggaggggacttaaaacagagtaaggaaatcagaaacaatttcctccacacagaaaagaacagaactctcttacctatgaaccaggtagtttccaagagagacgctgagggatgtttagaaagcctgggacctgcagatgccatgtcaggcacgcttgctcctgcataggagactaaataatctcgatatataaggatggcagtctgttgtcttagatcagtttgagaagcagctctggcagcggggggtgtaggtgtgttgcactacactgaatggaataaggctaaaaatatgtttagtgtctgataagaacgccagttttctcaagctctcatttaacgtcggactttctgttttgcttttaaagaaaaatgttttacaagggcagcatgaagcggacaaaatctggagcaaagaaggattttatgctgttgtcatttttctcagcatctttgttattatagtaacgtgtttgatggtaagtttgcttctttgtatattttatcctttgctcagcccactgcttgatattagtgggtacattgccattcaaatgaatgttaaaatgcttccgagcagaaggaagactatgatcctgctagattaggaatatttcatatctgacatcagagcgattgctaaaggagagcttatggaattaaggatgctgacctgaataataaggctgtaattgcaatgcagtttttagtaacttgatcaactctgagaatgaagctttagamagtgatttactgaggtcactgaagccctcaaagtcagtaaagtctcacgggcacactttgggtttactttatttctccttttatatcatctttatggaactcaggaaaaaatttaaaaagaratatgtctttgagacaagattactccctaaggaatggttgatttccttatttttaaaaggacttgaaagcattctatgaaaaggagatgattataccctcaaaggctaagttaggtagactactaattcatttttaaggtggataaatagtacaaaagtataaatgtatatgctggaatagctctgtaagtaataatgtgtagcctttaaaagcatgtttctaattttaaaaatagaacccaaaacaaacttaacccactaaattaagcagtactatttggcattgaatgaactaacggtatctttagggtagaataagatgtttctactcatttgaaaatttcaagatgtaatataataattagagtttacaaataggttttaatgtcctttttccctgtgagctatgttctttttaattttgtacatttaaataaatacttcttccttagtttttaagtgccccccaaaagtcattatgttacttatttctctccacaatcaacaatgttgctaagtgttttattggattttgtttatttctgcttcccctactgggaaggggttactgttagaaagattggggctccctctggaaagacaggctgcatgggctaaacttagaggatataaaacaagcacagtcttaaacagggtgaagataagcatgttttctagagtttaaaatctgtgaagtaacaagagtaccctaaatcttccaccataatgaattcagaggtagctcctatgggtcaagcattaagaaaaaaaaaatttctaagaattgtgactcaataaacaaaagaataatttagaattgagtaaaaactgatttttatatttcacatggcagagattaagaggaaagaattttaatgagagaaagtgggaggttttgggaaattatggcagcgtcttctgggcatctctgttttaaaggacatagttccttgttatggttaattgcattttaatatacgtgattcttcctttatatgggaaatctcaagtgctgttccctctcttgtcagtcacaattagggtatttttctgctttgcagatgagaaaggataagagaagggggagaatagaaaggaattgaaagtgataaaagtggaaaatattcaggggatcaatggatgtgattcagaagagcaaaggcaaggatagaagaagggaagtgggaaagcagagtcatgcccagcctttgagtactaaagggcagcagaaacagagcagagcttgctattaacatatagratgtgtttcagattctgcatttctaactcagggcgtgctcatgtactgaatgtaactagataaatgcctatgttggtcttgtggcaaaaggacctatagtagtcacaccctcaaccacttggggccagaggatgactcttcttttcccaatatttgcaaaacatcaatgtaaaggtcagaaacttagggaagtcgactctaacgttattagaacaaatcaagaaaggagcatttcagaagtataggtgattgctctctattgggttagcaggtggattcatctattcattcaatcaacagattcctgcagaatattctctgygggtctatttgttgctggtgctgtgggcaaaggagaaaacaagacagataagatccctattttcttgaagtctttactctagagggagacatagaaaataattaagttaattttaaaaaatcaaatggtgaacatgctatgtgagtccaactatatgacattcaggaaaagtcaagcctatagaaaatatcagtggttrccagagatttcagagaaagggaacgattaggtaggggacagcagattttagggcagtgaaactattctattttctgtaatgatgaatacatgacattatgaatttgtcaaaacctgtacaaggtatgaagaatgagctctaatctacactatctacactatggactttaataataatacatcaatattggttcatcagttgcaacaaatgaatcacaccaatgcaagatgttaataacgggaaaatgaagagatagggaagaagggtatrtgagaacttggtattttctgctcagtttttctgtaaacctaaaactactctaaaaaatagtatattaatttaaaaaatcaaatgttgataagtgctatgaagaagaaaccataataatgagtgagtggagcagagcaacctgagatgtttgagacctatgggtgaatatgtgagtaaaggacccctaggcagagggtactgtgggtgcagttagaataagcttagcctgttcaggctctaggggaagaatgttttaggcagagccttgatatgatctgctgtgtgtgtttaaaaatcacattttcttctggtagaaagtggtggtggacagaggatggggagagttgtggaaggaggaggatctttctggaggcttctgcaatatcccagtgaagaagatgctggtggcatagaacaggggtgggtggtggggaaggagagaagtgaaggattgagatctatttgaaagtagaaccgacaaaacttgctgtgtcccaatcctcagcaacaggggtaaaattaaggatgactcctaggttatttggcttccctgactgtgtggaaatgttctcatttcctgggagagggacacgttcagaatgaggatgagcgtgttcagatggttcttaaagaaatgaaagaaataattagatggatttcaaacactgtcttaaattttaatttgaaggagtcacttttaaaagtaacagggggaccaagtgcagtggytcacgcctgtaatccctgcacttgggaggcagaggcaggggaattgcataagcccaggggtctaaaactagcctaagcaacacagtgagaccctgtctttacaaaaaaaaaaaaaagggtttaaaaaatcatccaggctgatggcacatgcctgtagtcccagctactgaggagactgacggggaggagcacttgagcccaggggtttgaggctacagtgagctatgatcatgccactttactccagcctgggcttcagattctctgcctctgaaaaatatataaataaaaacaaattctgaaaagtaacagaggaacccgcagcacacagacgggaagttcatattcacaagaaaagaagtactacctaataggattagcacaaagccaagtttatctgatggaacttaccacagaggagtcaagagttcatgtttagggacatgtcaaagcgattatctaaaataagctcatctttctaagtgttcaaattattttgataataagcttgatttaaagtaagtgtttcacgtgcatttctcagtgatacttgtactatcactttcgtgattctgaaacacatgtattccaactctgtttcccatagttttgttgattccatgacaaaggaaagatataactcagaattttccccctggcattgattatatttataacaaatcaagtgcctccatttgcattggcattcctacatgccgtagaaatgaaaagcatgggttttattataaaattatataggtaaattgctgtaatggaaggttgtatgtgctatgtaacaacaacataagacttggcagaatttttgaaaagtggcatattgtttactttccttaaaatacaaaaaaaaaatgttgccaggcataaaattagacaggcatgacattttcaaatatgctgacttatttagcacctcacaaatgtgaatgtgcagtgggtggagcgacaaatagaaaaatacagttttccaagaaaaaatgtgtgggcaacttccaatccattcagtctgttttagatgaaagaaacttactaagaagaattagttcttaaacttgaacaaataatagaaagaacaccatttrtcatctaaattagacatccaaatgtccttacaggtttattaacaagtacaaagacatttatgaaatatagctagagatgtctacaggccagattgcttctggaaagcagttttagaaatcacatgaaaatagttgtttggatcaataaaaacactggcatgttagacccataggagagtcatccatatgggagggaaagagtttctctagttgtagtctggtagccgcagcaagaaatcctacattgaaccacctgctatagccttaacatcatgtaataaatacatgtcaaaggtggacataattttctcatttgttaaatataatccctcgggatgaagggaactaggaccagattcctaactggaatgattggttaggtaggcatatatctcaaattaattttcaattttttttctgtattaagaagaatacaattgtcttaatagtaataacattaaaaattagtttcttccatttattgcacacttattggtactaaactggtactaaatttactgtagtgctaaatgcctaacatgttttagtttcctaattttacttatgagaaaactaagattcagaaaaaataaatgacttgaccaagaacatgcaatgggtggatatgggggtggcagagtagaaagtggtaaaaattcaaacccaagtctatctaaattgaaagtcagcattctttaccataattccatttgttttcataaaggagtcaaactgtggttgttgttttttgttgttgttgttgttgtttttagtcttatcactctgtcttgtgaacatatatttctggccacaaataactccagtagtagcagatgcgaatggctgtatttatcagagccattctacccagatggaactggtaaatgtgtgccacattatacctctgtgctgtgggcacacctctatttttgcacttagtactttgtactgaacataatttttacacatttatcttttctggaagcctatgaattcccagaagacagagttctgtgttacttttgcatctacaatatcttgtttatggaatgtagtagggattgactcaggattattaaattaaaagagtgaatgaactctttcagaactaattgtaaaacactgtaaagaacaaatgttaaagactagtggttggtggcatcgttttgaaatctgaacacatttgacagaatgttttgtgttactcatgagatttttgaacgaaaattttaagctgcagaaaagcttcatcgaatttttttagcttcctcccatttctgtgttcctctggtttttttattcccactattattttctttctcttgctatagtttgagttttacagctcctctcattcaataatctgttctcttttccttttttaaattattacatgactttattccagtccaagagtcaaacaagctcttggagatgaaggcaaaatgttgacttgccattgctacggtaagcttttaggttgagtttttcaacaaagtgaattcccatagagaaatatgaatatgctatattccagatctcaatctgtgcagagaaaaatctctgacacacttttccagatgctttcggaaagaggtttcaaagaaggacatgagactttggaggaaacaatagagttgaatgatcacatacctggaagtcacaaaacttggattctaggttttctttccaaacctccataactcatccaatagctcaggacttaaatgtgaaatgaggagattacaccacaaaaattttatgatcccttacgtcagggttttacaaacaacactactgacatttcggagttactatttctgttggcgggggtgtgtggtgagcctttccaatgcattgtaaaggtagttagcctctgcctaccagatgccagtagcaccctttcccttctccttcccccacaccctgaaaatatgacaaccaaaaatacctccagacactgccaaacgtttcctgagggcaaaatccctgccagttgagaatcactgccttatagcttaatttcatgacaactaccctattgccaagtagcaatctcttccattttttccatattttttcagacagcccaatctcttgagtatttttaaacactatcttatatacatcatacattctccaggttctacttttccctaattaaagatgtagaaatcagtttgtacacgtaccacacagagacaggttgcaaagttgacctgtaaccagacatgaagtaaacagatgactgattggaaaatatgttacaaaggtttctcatcaaaaacataagctcatgaatggtaaggaaggactttggactagactttgttttacactaatataaatcataaaattgacctgtcaagaacaattgagaaggtcaagatttccttggctttcccattttcgttgttgattcatatttctccaaaatccaagtgtaaacaggcaagcaaatgttctcatatgcatattatatttagatgtgaagagcttaaaatatataatatatgccttatcttctaagtgtatttttgtaaaggtacagatatatttgtttcttcatttgggaaaataactttcttgcaactaaaacaatattttaaattctgttgcctcatcgtttagtaattaaatgtttagctgaacacaataagcctaaaatatatgtatcatctgattgatactgttctagtgcaggttttgtttttacaccgtgaaggtcatggaaactgaagagaagcagtgagttaaaaaccttagacactatgcacatgataaaggcattcatcttcagtcttttccatcctatagcttaaaaaaacacattacacttgcttgaaagtagttattataaaggtaagaagaccttttacttaatatcagacatcttttctttctcattcatgtgataaatatttatcatgtgaatattccaaatccacccttttttcaaaatttaagctttaactttaccctaccagagtcaatgaatatcaccagtataaaagtttccagattacaaggaggtggactgacataaaaaacaataaaatgtctttcttttcttaggagttcaatgtttaatatgcatttctagttctatctcgtaggtgcatagtcttttcccttaaggagagctcgaggttacagtgagctatgatcacagcactgcactttcgcttgggcaacagagccagatcctgtatcgaaataaaataaaataaatattaaaatttaagagggcaaagtggtaagaataaaaattctggttgtccaaattattctttcatagataccctaaatttaatttgtcaagtatttaccagatactcaagttgatatatgactaatgcagagatttaccaacataagaaactgtggtttatggcataactattattttattaatacttgcaagactacttttttctactaagccatgttggatgtatatctccatttctataaatgtcatagacgtgtgttttacggttattccttctgtaagcctaccatttccccatgtgaccaaactaacatctggcatttttcataaaattggttaaatttacttttgaatatatctttgtggaacagattcatgtgcacaattatttgatacatatgtgcagcataactggaaataccaagtgtactgtcttgagaaaaatctcaataccatgaaactgagaaatcatctctcagagggctttgtttactttatcgttaagcctttattttggtttgtcggccagggtggggtggaggagatcatactcttgtttagtgtgagaaaatgtgacaggagttttttatatctccttctatagattcttyacagattaaaagaaagatttcagctttccttaagacaagacaaagagaaaaaccaggagatccacctatcgcccatcacattacagccagcactgtccgaggcaaagacagtccacagcatggtccaacctgagcaggccccaaaggtactgaatgttgtcgtggaccctcaaggccgaggtgctcctgagatcaragctaccaccgctacctctgtttgcccttctcctttcaaaatgaagcccataggacttcaagagaggtaagagcttgttctgtataccctacgtgtggctttttataaaaagagtattcatcaactaaaaaagaaagaactagtaatgattgacataattgggtagaattgttcaccactaaatggacagtcagatgaagtagtgtttcttgtctcccaaaggaatccaactgtgttagataaaatctgttaggtatgtctgattctgctaagcttgtctagattcaagatggtatagatccaagcaaagttcatcttcaactacaagacaatttctagcttattgaggttcactgacctcacaagatgctatcttgtttaattgtcatgaaactctggtaggtagaagactgagaatgaactcagagtgtttcctgcaaaagcccacgttgtctggagttaggcaggagttgatgccacagattaattttttttaaagttttagctctgcattttttaaccacaacaaacattcagtatcaagatccatgacactggacgggcgcagtggctcacgcctataatccaagtactttgggaggctgaggtgggtggatcacttgaggccaggagttcaagaccagcctggccaatagccaggtgaggtggcacatgcctgtaatcccagctacttgggaggctgggatgtgagaattgcttgaacctgggaggcagacgttgcagtgagccgagatagcatcactgcactccagccttggcaacagagtgaaactctatctaaagaaaaaaaaaatccatgacattatttttgttgccttaccttttttgtgatgtattatacatgtgattcactttataccaatacatttccattaaacgcaaatccaatgtaagaaaacttggatttgcaaaatacataaatgagagactaattctttgcctctcaaaaatattaagtaaagctttcccatggcgtttcttaaaataagaagctttaattttatatttaaaacatgacttgtagtgtatccaactttgaacaccagggtagtgggagagtaagttctcaaagtaatatcccaggttcattctcctcttattttccatgtctccattttctaaccccatatattttgttgcctgaggtttttaaatcacatatataaattttgaatatatttcccatgatacatcacaatgccctatgcaaatagttatggtttrcacacacaaacacacccttcagaaaatatagcttgggattttaagaactgcagaatacaaaattgatccttcataattatttgaaagtattgccaaggaacaatggatgacataaaaataaaggaatgtgtttatctctaaaagtccttaaacactgaaccctttgactccacaacaggaagaaaacagagattgatcaagtcattctttccacctcctcccctaaaatacctgtggtttcttgatgggcaatgtaggtctccatgtgacattcacttacgtagatatcactaaattgctttttgtgattcagtgtggaaaggtagagaaaatggaactttctccctaaggctaactgggagtcaggagaactggattccagacccagccctgccgttcctgggtttggtggcctcacctgagtcattcactcatctggacctcattttcttctaaaagataaagaggtttaacttgattttttagcttctttctggttcttttactctggtcatccacattatttttgtgcttttatgtttgcttcaaagaggaactttgaagcacagacctgggcatcagtgatgaacgaagggccggtggcaagaaagggtctgcaggcaataggaggccatgttatctatagtagatamcaatgaagggtcataatgaaactgattaaaagacaaatttttattatcatcatgcactaccaattctaagcaaggtcagaataaaattgtctaggaaagtagccattcccagcatcctgccctctgtagaccactgctggacatgttggtctacagtttaaaggagtataaggttaaatattcacttattcatttcattaaagtgaatctttgagaagggcgaatacaaggacggaatcatacccatctctttggtccacgtgggggattctagcagagcaagtgtgtaatcagtgttaaatagatcctctgtccccttatctacaacttcactgcatcccacacttcacctcctactttgttccacctcagagcaggaaaagactattctctccacaagggctccaggtcattcacctcaaccctagtaacttcatcagttttcctcctctaccttcagctgtaccctcttttctaatgctgttccctcagcatacaaataggttctttcttgtattaaagaaactcccttaatccagtgcctcctctggtattgtttttccttcctttctcaaatacatgtcttaaaagaacagagtgtacttgctgcctcattgttcttctcccacctttcattctcattgcttctctcacatcctcgattatcaagttaattatcaatggtctcactaccaaatccaaagcacatgtttcatttcccatctagcactagtaactatctccttcttaaacttctctcctcctttggcctcatatatatcatttttctgtttcttgcatggctaccttcggtctcctccagattcccttctcttgttaacctcagagtttcattctgtgtcctcttctctccttcctgaatcacccaaccatggccacttcttatcttaccaccttttagtgattcctgaaaaagtacctttagctcaatctacctttctgttgaaatccagacccatatttcagctctgaactctgtgtcactactctgacctttcttaaacactaccaacttacaacattcagaaatggaactcaagaccttcctcatcaaatcctttctcttctttttaaattgtgagtctctgaaaccagtaatatcctcagcttctccgtgttgtttttcccctccccatatagccgaacattatgaagacctggcaccttctcccaactgyttcccccgtccaaccccaatcccactgagaactcaggatctccctaattctagccagtctcctcctggtccccacctcgaattctgtttttttccagtccactctctagacctcttaaactggttttctaaattatatttgagtgtttttctctttataaaattcctcagtgtttccacactgccttcaggaagaaactgataacttctacttatgaaatatgaagccctttctgatctggcctttggcagcctatgttgacccctatttcctgctaaacacccccttggactcatcctgctacttggacatttttccaggtaccatgccattctcttttaagcctaagaattaatacttgcctagaacctgtccttttccctactccttgcccttgaaaattaccaccaatatagtgggcatgaatctgggtctacaaatcaaaaaaacaagaaatgcaattttatttttctgtaactcaacctaagcttttttgctagatgtcatttcacctaaatggtagaaactcaatctcagcccttttctgattcatctaacctacttctggtttcctagggtttcctctacgttttaaggagactttctcaacatgaagagtaaggcccctrtctgccttgatgtcatctgtgcacattgtcatctgctaaaatgtccattatctctttggttctcataagtattcccaggacagttaccaccatgttgttccctgttgctattcatgcagccccttcatttccagcagttgctttctccttttctctctctcttcctctttttcagttgtatccaaaccactgttagatgcccaagaatcatctcactattctaccccaaatggaggcataggaaaacctgggcatatctaaggcatgatcccccagaaacactttccagccatttctcatggctctaccaaggatcacagtcctcctattgagggtcccccacttcccagggctcagcggtgaaggatccaggggtctcacctgcacccacaaagcagccgttctaacacttcacmctcccctgagcccatgggcgttttcttaggctttgggaatagaaaaccctactctggcttatttcatattctaccttatctgacatccacaccccgagacrccaccttccaccaaagtcctggcctttagaacacaaagcccatgacaggactcaaatttccctgctttctgctctcagatttcttcaaatgcaataaaacaccaaaaaaccctggcagcccgaatacagcaaaggtccaaaggtgaaagagggagtaggaatacagggaggggcattcaagcatcacttcctcttggaagccaatttgaggctccctctgcctcctcctccttcctccagcccactactgattcagctacctctcttctgtatggaggctccccgctgctttagttccataacccagtgtgcatacagtatttatagcacttctttgttgtctttaagttctggtttactaatctgttgtagccaatagactctaagcttcttgaggacacatatatgattgaattgtctccttatctgttacatatagaacataatttctggaaaccaggagctcctggagataaatgcctgaatgagtgaattaaccaattaatgattcttttttatgactaacctcaggttaactcccagcagttactgggaaacactttgcttattccaccatcccttcctgttctattctcactcccatttttctaccacaattccctgccaagatggcataatgaagagttttaagagtgaccaaatttgaagaatgtacagtgttccatgcagaaaacttttctggcagttttaagccttaaaatttaatttatatatatatatgtgtgttctaatggtgcctttaaaataggctcatgtttaatagctctccatcttttgatcctggagtgaggtaataatcttctacttattgcataaaagtatggcttcattaaaatcaccaggagaccataaagactgcattataagtcacttgtcccaatcttttggatcatgtcatataaatttctcatccctgattgggagaatctatcactttgatatcattaatcataaaatataattttaaaattaaaagataagtcaaataagatctagagactaaatggattgcttaactgagtataaagaatacactctgaaattatgaagattaaagaatcttataaaaagaagaacatattagccaggcatggtggtgcatgcctgtagtcccagctactcaggaggctgaggtgggaggatcacttgagcctgggaagcagaggttgcagtgaactgagattgtgccactgcattccagcctgggtgacagagtgagaccctgtctcaaaaagaaaaaaaaaaaagagaaacatagcaattcagtcttcttttctccctttttcaaactaatcgccaaatcatattgattcttgctcctccaactttctcattattgattatctctttctgtaatcatcaccttggacccagctctcattacttcatgattaaattgttgtgtcatataattgtacaaatgatattaggactaatatatgtaatatgtttcatatatattattttatttcatcttatctgtctgcatctaattctctttcccccttcaatagtcttcaggtttatcttgctataacaatctttcattatcatactttgctgtgcaaaaatccccatttggctccattttcttacagaataaggcatagaccatcttgttgggcctcagatgtcctataccatctggccctgatcatttgctccaaatccatttgcaactacatcctaaaataaaccttctattccatgctctctgtttccatccccatccccctctgagtgctgcgctcctgtccacatttgcatttctgtttgcctggtccttcctcttccctcagcctaccgatctctagtctccagagcccaacacaaaacttaccccctaccactggccatgtaacctatttgtgcccacagtgatgtataacacctataaattctcagatataccactcctctggcaatgaytttaattgaacaatcattcagaaagggacttgaactggtttttaagtggtttgtcttgtgttttcagcagatgacaagaattttaagaacaggtactatggctcaagatactctgtgtctcctgtggttcctgtaaaccctggtacatagtaaacactcaaaaatattatggagttaattaatgttgcttcacatctgaagatctcgtctgtttctaaagaatcttccataagaaccaatagcttaatgataaactatagacctgagtctcagctaatactacctctgacacttattaaataagtggctcaacggattaattaagtcctctgtagtatagttttcccaatctataaaataatatctgctccaccttcaaaggatactacaaaattaacaatcaatacaaaatggcatggtgtctttgagaaggaaaaggaaatctaatattctttttgtttttgttctctgattccatttcacaagcctacactaggtcagttatacttttgaactcaggagttgaagctaattttctactgaattgctacagttgagcctgtcatataacattatatttttaactgtcaattaacatagttttgttcatcctatttgtaaatatacagttacatgtaatttataagtacatacttataaattggccagtaaatgttatctaataaataacagtatcaatttaatcaattctggtctaacaaatgcattcatttctcatggcgagtccaggtacaaattcaaacacttgctctgtaactaccacatatataagttggaacctgtttattcacctgtattgaggagcatagcatgtgccttgcacagctcttgggacagttaagctacatgacaaatgtcacatggctggcacagtgtgaggccacagttagttcatgttccctcttgtcttttgtcccatccttgccctcccaaaatgctccactgatcactctaagggaaattgtatacatgctgagttccaaattcccattaaatgaggaatcacattcaaactctagaaagtacattttctagaacttatgaatctgaaagattctgcacattttccctttgggctactgtayggctaatggccaattttatggaaaggaaatcaacaggcaaattggatatgttcacattatttcctcatttttctcacttgattttctattacaagtaaacactgtgcaaggagaggtagaaaactgtccaggaaggaagagtggcacactgtaatatagcactctccatcctgacttcatttctcagtaatcagttggtgggccatcaggactatgatattaatgggtgtttttttctatcaaaacggaggtctcagtaggcccccaagggttgctgatatccaacgaacaaacattcactaacttttcttcagctgtaccataatagggtatacatgttatgatttacaataaatactgtgaaaatgatataacacccaggattgtgagtctaaaggtttccttaggggttgctgagcttgggagatttttatcagaactagaaatttgtctgcaatggtggaagcaatgaaaagacagtacatgccatgaaaatgttgaccattctacattcaaactcaaaagattttgtgtattacaatttcctcctggcaaggcagaatgtcctgatgtatctgcctygctttccctagtagaggtacatttcgatgcttaaagattttaacttggagaatctttaatcattcctccactgatctctttttgggacatatgagtaaagagaagggaatagaattaatatgactgcatatcagagcataaagtgtaaaaaataccctggaagttaaaatctgtattcatggctgcaaatggtggctcacgcctgtaatcccagcattttgggaggttaaggcaggagaatcacttgaagccaggagtttgagaccaacctgggcaacatagtgagaccccgtctctacaaaaattttttaacaaattagccaggcatggtggtgtttacctgtactcccagctacttaggaggctgaggcaggaggatatcctgaacctgggagctcaaggttgcagtgagctgtgtcacaccactgtactccagcctgggcaaaacagcgagactttgtctcgaaagatagatagatagatagatagatagatagatagatagatagatagatdttcattaaatagacccataatcgaaaatggatccaactctctcattttctgtcaaataaaaatggggcccagaatctttctcttaggtctttggtgaggttctgtaaaagcacagcctgagacaagggctcttgtccaaatgatgtgttgagaagatgctctcaggggaagcttattaggaaagcagggcaagcagaacagagaagaggacaagcaaagaggtggtggtagcagccatctaccctcagcctgattgcacagggatctctgagcatgagtggcccctcatggacagttgtctcaccttgaggtgagggggctgagcctctgcaccctcatgccagccaaccactgactccaggccacccagggatggtggaggcataacttcctaggcacctctggctcagcaacacccatcagctgagggggctgctccagcgaagtggcagctgggcaccactaacaggctaccctcccagcagtggggcaggagaggatggggcaccagctggagaaaggcgacctgggtggggcaccaacagcattactgtacttgccaaaggtcgcagcagagctaagtttacactccaggttcctttgattttcccaggccattatacacgtaccacacggcctccttcaaataaacaccattcattctattggaacctatgacccagccccattgaacacagtctatcaaccatgactcagttgctcagcctgacaacatgagggcttataaacataaaatatagcaaacacgtagaagtaaattccagtttaactccaaataacatcaataaaaataacaactcagtatgccctgttgacccttcacatgcattatctcatttcaccaacccaagggactttttatcccctccttagagtggaaactcatgctcagagagtataagttatggccctaataacttaataktaagtcagtaggattgtgagggtgacaaatagaatgcgaacccaagcagtattgctccagaggctgtactcctaattaataataaattggcatgctttgggggttgggaggaggcgtacacacctataatctgtgggaaatcaattttaaaataaactacaaatcagtatatttagcaagtaggtatattatggagcgtcacactgtttttcctcttagcaaattttatgcttggctttcagaatatttttcagattttaaatcaagcaaagtgcaatttcatgaggtggactcaaaacactcatgacagataaccatttcactgccattctagaagcacattgtctgtctcagttttttccttaatctgatttttgccattctggaggcctggtggtaatctgacataaatgaccaagaggaaggtgaacacgaatagagcaaagaagccaaagtgagggggctataaggcaataattcagaatactcaagtcagaaaaggatggagtggtctccatattgttcaaacatcctgcataataactcgcccacttcattgtgtgtgtgattgtcagtggaggtggcaggaacagcagagaagcacatggtcatgcctgcactaagctgctgcccgtgctgctgtaatagaaggatgcagagtcacagctgatgggttggacactaacctgccacctgccaaccactgtgcttatgtatgatctcagacaaccttcacaacatcctggaggcaggcagtatttctatgcccatcttgcagttatgctaacagagagacttagagagataagtaatatgctcaatgtcacaaagaaataaaaatctagccaaagatacaatcttgacaacctgcttacaaaatctgcacgtaactaccatgtcttacctttttctaggtgatacagatgacaaaattttaatcttctgatatggtttggctatgtccccacccaaatctcatcttgaaccgtagctcccataatccccacatgtcatgggagggacccagtgggaggtaactgaatcatgggggcaggtttttcccatgctgttctcatgatagtgaataagtctcacgagatctgatggttttataaagggcaggtcccttgcacacactctcttgcctgctgccatgtaagacatgcctttgctcctccttcaccttctgccatgattgtggggcctccccagccatgtggaactgtgagtccattaaacctctttttccttatagattaactcaatctcaggtatgtctttattagcagtgtgagaacggactaatcaccttctaacatttttataaaatattttcatattcttatacttgtatggggatgtccagagctgagggaggcactggaaacatgcacaagcccttcatgaacagtgagcatcaagctgttctctttatttgtcagattttatataggtaggttggaattctggagggttatgaacaaaattttcatagggttttttattctaaaaaaataaaagaccccacaggaatgaagaaaaaggaggcaaaagttttgaaacctgcctgaaaattaatggtacgtcatgagacaaaaatgtaatcttgttaagtgaaagaaatgacagtggatacaacccagggtgagtaaaacaggagccaacatatattatttaagaattaaaagtagaggagctttgcctaaaaaggtaaaaattggccactactcattggaaagcacaggcctggcataatttctctccaagcagaccctgaaatgtttaagccattgtagtctaatgagtcctgaaagtgtagacctggcagtggctctaagaggaatcacagtaattgctcctttcctttccttgccttccctttctctacttgtggtccctggcagagcagcaggaataagtcccactgagtcctctaactgctgtatctgcccccagaccacccctcatacaggctgcttcaccctgaggttcaagcagaaaggacttctcagcccttccaccctgacccccaacaatccttcaacatccattagcctgcaaccccatccaggacactgcttccagctttacagggtactctccatttgcactcataccatgggggacaaaatctaactaccctgggaactcttttggcaattcagtagggtgtgcatttctataaagttctttttgtcttgaccctaaagaagaggtggtcgtggtacaattttttgagattcaaattctctgattcctctacatgtgattaattagagtttcactttggagggtactaaatgcagtgctttttaaaatgagattttttttatttttgctaggggaccatgttccaaatcttgatgtataggttgacagaattaggtgaaatggcctgttctgaagaagcgttttaatcagggcaggcacagataattcccagcataagctttgcttcctattttaagagcgaccagttctgaatcttagatactgtgtcaggaggtttttccttgcagccagagacttttgccttaggagtttttggaaatgtgtcataaagctatgtagttcagggtcccactatgtgcattttatgaactgcccaaacattgttttcctgggaagtgaggcaccactctcctctcatcaaattcacccagatattagcacatgacctctagagcagaacagtgaagaatcacaagttactcatggcaggcgacttgaacacaattatttttcaactgatgtgggttttttctgtaacataaaatatacacttcaatttatttatataaatataaaactatctttttctgkaaatcttataaaaaccactttaaagtgtcgttcccatttagcaatgcagcatgattatctgggtacaatctaaacatggagagagcactgttctcagacacatcctgatgaagctcacgattggaggacgtggaattagttccctctagtggagaacttcatgttgacacagttgttagccccttgtctcatggaaggaaaagaaaggtgaaatctttttttttcttttttttttttttttttttgccataatttttgttgttgtttgtttgtattttttttatgacagcgtcctctctggcgggtaaggcataatctttttttggtatataccttagaaaacaggtctcagtgtagtgatgaaacagctttaacttgagaattgacaaattcttgtgaacacttttaaatatgatatactttctaacaatgcttggcatccaatcattttcatttctcattattttaagtaattttaacaacagtgtatcaaatgaaattattgttccctaataatgtcttatagtgtatacatttgtttatttaaggaaacctttttttccaaatcatggattaaaacacagccctcaaggattctccccttttccaggccctccccatcccacctgccttacttttcatttcctgcgttttccctctcggctttgatttccctcaaggcggtgtctgtagcacaatgcctaccaccttgtacgtgttccataaatatttgttaaatctcaatatgaaaaaaggaacaagttcttggacatcaagttaattttataggaagaaatatgttttaaaaaaataaaaatagatgatgcgccgggcatagtggctcatgcctgtaatcctagcactttgggaggctgaggtggtcagatcacaaagtcaggagtttgagaccagcttggccaacatggtgaaaccccatctctactaaaaatacaaaaattagccaggcgtggtgacgtgcgcctgtaatcccagctacttgggaggctgaggcagtataattgcttgaacccaggatgcggaggtcgcaatgagctgagatcatgccactgcactctagcctgggcaacagagcaagactctgcctcggaggaaaacaaacaaaaaaaaaatggatgctcaccaccacctcgcccttgccccacagaagcctgtggtgctggcaggttgcctggcctcattagacatcgagagggagccccttggagctgtgctccctgcatgtccttggcaatgtcacgctgcacctggggctctgaggggagctcctaaaaccctcacggtccctgctgtgaatatgatcttctgaatcatttgttttactcttgttacgttggctcctaacttagcrtgttgttaccaaatccctattcagaggaatattttttcctgacagaatccttagtctacttaaggtttctaagaaaaaaaagttggaattttaaacccaccttaatcaaaaataagagtaaaaatgatgaagtactaaaggatctatgagaatgaatacattcaaagtatggcagaggcccactttgcctgaaggaatatacctcagatgtggatccttcatcttgtcagtctccagaggatggtcagccctactcaaacacctgtccgtttttccaggcagctctttttttcattgcccaaggcagctttttaaaatcagtgttgctgtccttaaattctcttctcccatccgatacatagaaaaatacagaatctaggaataaaccatcctaaattacctctcttgttccctgaccccatcaagaactcacacatgtgtgtgtaggcacacgtgcacacagtaggatctcctgagagcttattcgtttttgttttcctacttcctaataccacacacataatagaggttctctaaaaattgactgaatgatacagagttagccttactcatgggagttagacatattcgtctatttcagctctaaaacatccagttgattctagaaagcccagagaaagggagaaattctcacttgccacctccttcacgggtgcttaaattatccaaccaccctatgtggccaattggtttttaaggtctgtggtcgtggcccctctgctcctgtttaatgaataaactttgtaaactttaagagactctatcctgaacctgttaatacagcgtaaatatgcatcaagacacttaagaaaatatcctacaattgagtggttccatattagtgaaagaatggtctagaaatctagagagaggtctcagacaaggcgattgcaagtttctccaggtgaggcaatacttcctcatctttgaacattgtgtagaggggtgactgtccttaccattgctttcctatttgtacatgtttaaactccaacatttttttttcatttctggggagggatttttcttccatccaaatttttgatccaggtaatcattataatcttgaccaatggtttaactttccatcacagtttcatagaagagagttgtttatttcactttaaagtatattttctttcttttccttcctccttccttcctctctctctccttcctccttccttcctctctctccttcctccttccttcctctctcttgccttcctccttccttcctctctgtctccttcctctctctctccttcctctatctctccttcctccttccttcctctctccttcctcctcacttcctctctctttcctctctctttccttccttctgtctctctctctccttcattctctgtctctctctctccttcctccctcctctctctttctctatctccttcctccttccttctgctctctctcattctctctccttcctctctctgtctctctctctctctcccccaagctggagtggcgtggcatgatcctagctcactgtaacttcaaactcctgggctcaagtagtccactcgccccagcctcctaagtaaataggactataagcacatgccaccatgtccagttaattcttttattttttgcagagatgggggtctcactagctgatctccaactcctggtctcaagtgatcctcttgtctcagcctcccaaagtgctagaattacacgcatgagccactgtgcctggcctctgatttctaccttttttttttaattcatttattcttttgagacggggtcttgctctgtcacccaggctggagcacagtggcatgatctcagctcactgcaacctcctcctccagggtccaagctattctcctgcctcagtctcccaagtagctggggttacaggtgcccgtcaccatgcccggctaatttttgtatttttagtagagacggggtttcaccatgttggccaggcaggtcttgaactcctgacctgaggtgatccacctgccttggcctcccaaagtgttgggattacaggagtgagccaccaagccaggccttctratttaaatatgttcttccatatatgacctgcaggtggcagagtgaaacagcactatactgtaaaagtaaaaatcgaggcttgggtgtgacagaaattctcattagaacttacatcctctagggtgatactagtgaaatctagtgtgggcagggtgtctcacaaaatctttaacacaatgtcaataatagtttgcttggaattattattttttcattgtttttttgtcatccactagttgtatccccccaagaggataaaaatatcaaatgacattatgaaaaatatcaaatgacattagaacgtcaaaatcctcaaaatagaaataacaagtaaaataattaaaacatggcttgaacatggttattggactcctcaggttttttttttcttaaatcattatgattcttcataagaaagtaaactgtgtaattcagtaaactaaattgtaagctgcttggaggtaaggatgtctcttttttattgccatgtccatgtatttgtattgcctattaaggtgcctggtgtacattagaccttaataaatgcttaatttcgtccttcattcccactcactgttggtaaaagtggttatggtgggcatagttataatctagaagtaagtgttaatattttagagctgggggcctctcaaaaggccaaaaatatagcattttacagttgggagaaaccttagagtagtggtccccaaaactcatttaacatagtcctctagggaaactttgtaatatttctagatattcctatctaaacagactttccagatggaaaatattctagagtccaatccaaattcagcttcaacagctctggtccagggttggggaaagatgatactcagatagatagatagatagatagatagacagatagatacaaatagatcatctctacatgtaatctgtataaagatctatatatacacacatatatgcaaacatgtataacatatttaaatatattcattaaatgcatgtgtttaaatacatttaagtttaaatgcatatatttaaatgtctatggtgtatttgaatatatttatattagtatatatttctataatctgtatttaaattattcctatttgggaactgtaatctcagtctccctggtccaggtcgcaaggatgttcccataactctacagctgttgcagagcctctgatgtgaaagcagtggccataacccttattggaagcagagttctagaactgaaacaactcatggattgcaaacctggaagcttttctaataattttctaaaatcagtttcatttttggccccgtagtattccaacagctcttacctactctattatactgggttcctatagccatnnnnnnnnnnnnnnnnnnnnnnnnnnnnnnnnnnnnnnnnnnnnnnnnnnnnnnnnnnnnnnnnnnnnnnnnnnnnnnnnnnnnnnnnnnnnnnnnnnnnnnnnnnnnnnnnnnnnnnnnnnnnnnnnnnnnnnnnnnnnnnnnnnnnnnnnnnnnnnnnnnnnnnnnnnnnnnnnnnnnnnnnnnnnnnnnnnnnnnnnnnnnnnnnnnnnnnnnnnnnnnnnnnnnnnnnnnnnnnnnnnnnnnnnnnnnnnnnnnnnnnnnaaatattccaaaatctgaaaaaaaaaaaatccaaaatctgaaacacttctggtcccaagcatttcggataagggatacagggatactcaacctgtattgggttattcaacaatagaactgtagctggattcatggctagctatggattatttcacattttgataaatcagtacttttcaattatgctctatggggccttagggaagaggtaggctagtggggcctgggcccttctctgatgcctcaatgagctgagctctgcatgcacttgttttgattattagacttacaggtatgatcttattttctttcttaaccaagagcccccagctttgaaaagagtttgattaccactgatacagttgtttactcagacagtctgctcgggctaaacatgttcaagtgaaatcaaagacctgagggtgaagtagatcatgtgatgttcaagtacatgtgtctttctcacgttttggccattctgtgccgtttggatgcatttttctatgagactctgggtctgagtcctctattggtgcagtgatgtagctaggcagtattctctgccacctatcattcccctcaatgtatccaagacatctttagagtttcccagggctgttcataactaatataaaattttcaattctttctagaaaatactctcagacacactttttactggccacttggaaaacctgatcacaatacaaaagtatctgatagcttcttttatgaatttttctttgataattttttaacaaattaactcataagttatgtacatttatgcttagaagttaattctggtttttttaattcttataacccattttaaaggctgtgttttaccttatctttataattaaggtcttcaatcaatcccttttctggaaactactatagtttcccagagaaagcaatagttgtttagcaaaaacctctgtccatgaggacatttgaattaataagtgcctgagtgttttattttgctgagagagaaaaaaaaaaatcgggactaggaaccaaaacttagttccatccaattaggatccttccatgacagcacaaaacccttaaaatttgtgagacaatttcaagatttcttcttccacgataccgaagtctgacaatatatgctgtacatgatcaaatacacaataatgaatatgtgacttatgtttaatactagataggaattttaacatacatgttctttcttccaaattccaaaagcttattccactttcccccttctctcccctagccatcccctgcgtaaatatacaaatcttagaaatattggagagaaaaaaatgggaataagtaggaagaaatgcattttgtaaatgcagccaggcrtggtggctcatgcctgtaatcccagcactctgggaggtcgaggctggtgaatcacttgaggccaggtgttcaagaccttttagcagagacatggtgtaatctcatctctactaaaaatacaaaaataagcctggcataatggcatacacctgtaatcccagctacttgggaggctgagatgtaagaatcgtttgaactcaggaggtggaggttgcagtgagctatgatcacgccactgcactccagcctaggtgacagagtgagactctgtctcaaaaaaaaaaaaaaaaattaaatgcagactatcccatgatgatactgataacagataacatttatcaagcacttactacattccaggcactgttataaatactttacatgtataactcataagagtcaaaactaccctatcattattttccccattttacagaaaggaaaaccatggctgcaggaggttatgtcacttgctcaagggcatccaattggccatgagaggtgtgcaataaatatagaatacaggtggcctggctccagaccccaaattgtcaaccactgtacatacatttctagggccttaaatttctacccaaattttaagcctgattttgccctaaaaactgggcatatgataggtttttgttgcattaaattagattttttgtataattttcttgaattaagttgactaaaatatatacatatgtatatattttacaagtgtaatgtaaaatgttttgcaaaaacataaagcagactgcaaaaaaaaaaagcatcattctttactgggttttagcttggatcttctgggtaatgtcatacaaagaagatgttgaaaaatatcacttgtgatcatcatctatctatgatgtgtacattataagcaatagtattgacaatgattttactatttagggttcaacaggcgcagtaatgtccctccttagcgaagagagacacatcattgaatttaccttcaaccagggctgtgcattcatcctagaatttgacagagtctagaaatattggcctgtatgtctcagagagccagatatttaactctttgacgtttaaaattttgtaacacttggtaaaggtaaaaaataaatagactaagggatgttttaccattactctaaagaaataaccaattctaattttttttaattcttttcccccattttctctgttctattaaaaccatttgtaccacaaggacaattgtcagggtacaacaactcacctaagttggctctcggtactttttccccctaataatcagtccccaaatcaataactggagaatctgaatttttccatgtgctaaattctttgctgacagaagtacaagaacttaatacattggggaggtggggggacttctatttcctggctaaaatatagctgcttttcctagatttggtggataattttattctattgtgctttatttattcttagtagaacttgtgggattgttttcaggataatgtcagggtaattgttcacaattgagctatgggccaacccaagggcattctcctgagaatagtttggctaaaacatacaaaaatctctcctcttatcaaaaatatttcttcttaaacataaagataagtgaggaaaattttgacatgagataaaaataacaaaatcagtcagtgactgaatgtctcgtatgctcttagtacatagctagatggcaaataaatcatgtctcccagccctgtctcttcatgcttattttataataggaggatataatataagatgcccttctcataccggggcagggtgcactcaacaccctttctttctcaggaaggtggaataggccatgaggcagtacaaaatattgacgaatatgagatttcaatatttctccagcccttattaatatttttaattttaaatgaactgtgcaaataacacatcttatagaaattttgaaagcatatttaagcaaaaacaaaaataaagattatttcctagccagttgcaccaccaaaatagccaccattaacattatataaatatatatatgtgtgtgtgtgtgtatatatatatatccagacttacatacacatacatatatatacacacactacacctctagtaactgctaataatagtaacagcaatgatagcaattgcagcaggagcacgcaccaacactacttgtaacagtagcagtagcagtggtaactaccaataggggtcagtaatagcaacaacctgagaatatatcactacaatggccagaaacacagaggaagctgcaacaagggtagcagtagcactgaaggtgtcttggtagcagaaacagcagcaatagcagtgcagtagtaataaaaaacattaataataccagttaagagttacactgttgcatttattacgttatcaagccctgttgtgtttcacacatattatctcaattaagcctcatagaattccagtgaagcacgtgcacaagttgtatccccattttacagatgagaaaactgggcacatacaggttaagttgcccaaggtgacacagtcttaaagggtagaacctgaatttgaacccccggcagtctggctccataatccactcttaaccactatactggtagtgacagcagaagtagcatgaattctaaaattcagtatgaggagtattttgcaatttatatacacttataaaatgaatgaatacattttggaagtgattctgaaattggaagaatagaatgaaaggatatgaagtaacttaaaaaacctcttataaccaaaatggtcattttttacaacttccaacttagactatcaaagaaagcatattttgcaaacattttgctctcctatttcattcttcctcaaaaatctgtatctttttttgtgtgtttgtctaattttggggagtctctcactgtgaatttttaaaaataaagagcaaattgccatgctccttaatttatagacatgcctctacatatttaggtgcttaacaagtttctgtaaataaatgaataaagcaataaaaaataaaacttcagattcacactaaaagcaaataaaattgagttgggccatgcacataccactccaataagaatgttatttaatgctaatgcaaaagcagctaaggaaataagaaaaatctttaaaaaaaacaaaaaggtaaatttgttgatgctttggttggttctcttttgcttcctataatcccacattttgaaagttttatttgcaacctatatttgtaatatttaatctgtgtgtacacttgagactgtccttataaaaaggattctttctgcctcttaaaagctataattcaagataaagtgaaaaccaagtcgctataatgcataaataagattttatctttggaaaaatgagaaaatattgagtcctgggcaaaatttatgacctctaacataaatttgaattgtgtcctttttaatgatttcagattgccagaagtggcaaaattagaaaaattaagtttacatacaaaatagcttaaaaggggaaaaaaaaaagccctcaaaaagttctcttggaacttttctgcttagggttgcaagctgaaattttggtgatgtgccttgatttaatttccaagtctcttatctgtagtttattcttgttactgcagttgctactggtttttaacttgtacacaggaaaccagtgccaatcaattttgttcccaaggtgacaggaaaccctggttggtcagatgttgattgtgcttgctgttcrtgctccacccatcatattttcttcccttttggctgaacttaagacaaattaatcagtggtcgacatctggcagacagttttggtgtcttctcagtgatttgttgacccgcacatctaaacagtaaaaactcagtgcgtaaaacttgtaggcactaaatataaatgctgccaagaatctttttcagggacttgggtggaaggcccatcttttggctttttacttgaaaatgtgaattttcttgagtaatgaaacatctgttcaataaatatctcaccttctttatgacggcgggtggcttacctcactctattgtaaattccagatatgaactgtgaaacagggggcaaggaagggctcagagaatgttaagctttttaacaggcctctgctgcttgtaattaatctttagccacctgcatattttcttcataatgagtcttatcccaaataaacatatccctcgtcactgaacactctgagagaaaatgttggtacccagattctggcaaataagataactcataaataaaagctaagcacaaagtcaagccggatgacctccgcgtccctccaagtcaagcttctttggagtctcctctttcaaactcatggtttatgactcttaaaaaagaaaaattacaaactgtttactagccttgmgaactcttttcagaaatcatttgttttaacgagagtggtactaaaatataggtctaattttatcaggtctagtgacaggagagatcatgagaaacatacaagaaatgttatctctatataggaagatgaaggaaggtaacaatgcaggaaggtgggatttagataaacctaaaaagggcaggtatgttggaccggataggcttttcctgttcctaaaatgtcttgtgctcttacacaggaaaagcattcttattcacccgaggcatttgcaagtcctaggcacaagacctaaaaggaccctgggttctggtagtaagaaagcaggaaaggagtgggtgggaaaggaagcgtccacggggggcgcatagccgggacagatttttcaaagggtaaaaaagcctttagccatttttcatctatgcctccctcattttgaaaacaaactctgctagtttgttcttatttcttaatacaatacttcccatgccaaaatttggatacattttaaattggggtcaatttgggctgtagagtctctaatgaattggtcagcatgttcatgctctttgagagtctgctgccctcactgacctgccagttccaataatcatccaactatcctcccaacgattcctttcctggatatattagcagggcgaatttcaatccactttgtttatttgttcactacggtatcttccatagaaaagctaggcctgtgaaataaagattaaacgggctagaaaagtttgcggtgttatgaatcctatactgtgcagaattcataattccagttttgcctagtagaaaaaagcccaagatcataaatatttctaagcagtcagggaaactgcatttgccaaggccctataagaaagctgatggtgaacccaaacagaatcctgccaaatacctaaaatgtgttgaaatatattttataattcctcccccacaatagtccaccttttgatttgtgtgataatctatttggacaggagctatccaccgtgtgcctgctcttctttccacctgctgttccatcagccgaggaaagggttgtgcccaagggaggtggctgtccattgttattcacaatagcggtgcccctcatgaaatgctctgccaggatagataaattacctattcttagacagaagttttatatatstgcaatgttgactgactcagactctaatcaaaactgttctcttggttctcctcagtatatttctaactcctcggtatatttctaacctatttctaactggagaactttaggatatttggcagtaccatgtgtaagtaagagcttttgcaggacttccaagcaagagaagtaacaatgggtatatgcctgcaacacatttcttttaggggaatatggcacgagtgtttttgtggattatctggtttatataagatatgcattttaaataactaaacctgtgttgacatgcttatactagaaagcagtgctgttaaggagcacctctatataggcaaaccctattcagtgaagaaccaaatctgagctttaatctgaaaccaaatagaaaaagttattggagtcgaagatgagggagtggggtgaaataagattatgtatcaagcatattcaaatataggataatatcctagggcctagtggtagtaccaataagaaaaatgtacctgagccaggtgtggtggctcacgcctgtaagtcctagcaatttgggaggccaagcctgggggatcacttgagaccagttcaagaccagcctgggcaacatggagaaaccctgtctctactaaaaatacaaaaattagccagctactctggagactgaggcaggagaatcgcttgaacccgggagttggaggttgcagtgagctgaggtcatgcaactgcactccagcctgggcgacagagcaagaccctgtctcaaaaaaaaaaaaaaaaaattaccagggtaacagagcaatacctctacatagagaggaaaaaactggaaaagacttggtaagtctatgcctatacctaacatttgtggagcagttgctatatgccaggtactgtacaagatgcatcacagatatataaaatcatttcctcctcatatccacctcaggtgggtaaattatatcatctcaaatttaatgataaggaaacggagacacaggcattcaagyacatttccatggtcgcagagtacattactgcagagataggattmgagcccaggtaatgtgcccccagatctcacgcttgtttctatttcctgcttcccctaatgactaaggcacccgaggatttttctttttccaccttctccatattcataattagactatattaaattttttcagtggaggaatggaagcattttaaaataaaataatctcttcagcctaacacagaccaattccactttgagaagagcgatggttgcgccttgcaccctccaggtggcgcttgtgcgccacttacagacaggagaggtttcagggtcgtcggcagggtgggctcttggttttgttcaaaggacatttgagcattgtttctctgtcctcaacaatcctacttgagacacttgttgccattgtaagatttaaaggcaaatcagataaacaaagaaagggccacgtaccaatcctaaagctgacgtggagcagccgaagcctcccttcgcagaggtctgttaatggcatccagagaagacgcgcagtcactgtgggttcagactgcagatgctcttagcaggggtttccagctgggcgcccgtggccctctggaaggttctcatttggtatccatcggaaggccttttatcgcttgttagtaatgatacagatttgttgtagaggcaagcaattctttcagtrtttaagcctttgcaattttcattatttttttaaaaaaatgatttttttttttgcccttttgctccccttcctaacaaaggaaattgttaggaactatattactaatgtaatttagtcaaggggttgtcaaggagttccattaggatttggattgaaaagggatttctaggataaagcaccgttttgctgtagatatgatcttctggaaaggatggggccgggcagcctcgtgaagtttgcattcgtgaactttgggttcccgtaatcctacggcatgccttrtcgaggacagcctaggagcgaattggcagtaggttagaaagcatgattagaagagggaaagctgaaatggccttcatgtcggctgttttcctccacaggatactgggtgattcctgtcctaaccagatactgattacttaaagcttagcccgagagttcttgtcaaaaatgatttccgtagcgtattttgacttgctgaggtctgaagaactttgggaatttgttaggtgtggatctgaactccaggaaccggtcaggagtattcagtaaatgaactctatccgtttgaacagaatgtcttaagcacctcgtttttatctcattcacacttctccgaatgtcctcatctgacatggagaattattggtggaaaatgtgcgtattgataattcagacatacgaaagcaaaaaagtccaaaggacttatcttcaaattgttttacacaatatttcaagcatgtgcaaaatggtayaaatatgtttcaatctgtaaatttatgtattcttctagtatttccccattataattgaatccttgttttgtaaacatttcacctcatctacaatatacacactcaaaatatttaaattgttgaaaactatttttagcatgaatacattttcttcacataaaatacaaaggattaatgtaacatctaactctttaaaacattccaccaaatattcaaccctgaatggtaagacacaaaaaaggtgtgtatttgtgtttaaaacagtggaccggccaggcatagtggctcacacctgtaatcccagcattttgggaggctaggcaggcggatcacgaggtcaggagtttgagaccagccyagccatcatgstgaaaccccgtctctactaaaaatacaaaaaattagctgagcatggtggcacacgcctgtaatcccagctactcgggaggctgaggcaggagaatcgcttgaacccaggaggcagcgattgcagtgagctgagatcgtgctattgcactccaacctcagcagcagagcaagactccatctcaagaaaaaaaaaaaacagtggaccatgaggtatttattttaaatctctcttagaagtatagcttccagtgttaaatctatacaatactttgttgtctcaaatgttcggcagacaagaagcaattccaattctataaaaaatataacatttaaatcaaagtaatgggttttctaaaagtcattttatcctgattcagacagttartatttgagagacttttcaaataccatggctgtatagtatttttaaaaagaagattgtatttttcttttcttagcatagatgcctattcatgccagaaatcaataagcattattacaggaaaattactgaccaattatcaggttttatatgataattgtttaatatgtaataaaagcaaatactattttttttcctttggaatcaatgcaaaacattatgataaacagaagaaataattcatttctagtcagtytggaaactcctttgtatttcattcttattttccttttcacacctacaaatccctgccatgcacacaggaaatgcccggatgcatggaagaaattaaaattaggtcaattgtgttccatcttgttaggttagccaggcattctgtagatatgggacatgttctgtatttaacaattttgtcctgtgtcttgtattgactttgtcaggatgtgctgcatgtcctgtactaagcattttttcattaaattacaaaaatgtgatagagctatttttcaaaatctaactggggcgagtcttgtgcttgtgtttgctcaatttggtgaccctatcccttgtaatcctttgttagagtctttcagtacttagactcatttgtgtatttcttgagttcattttcatcagaaatgatcattttcagaatgaaatgtcactggtatagcttaggacagcttaatatgctaagatgacagagttagctggtatcagaagttattctcacctaacactctctctttatttgaaaagaatgttagtgctcaatgtttttaaagattttctgtgttcattattatgtcattcacagaaacatatattggagatataataaaaatgtcattattgagtatcagaaattaagagttgtccagataaatattatgatttttatattaaaagatctctgatgaaaagaaataatgaattaactcataaaacaatacctgaggaagaatagtatgttagagaaacaaagaatattcttgtagccgttgtttaaaagtctgtttttacatattcttcactgccatctgcctgagagaaatgttgaatatagtaagtttagaacattttaattttgtctttatggttatagtagtgatttggatgatatattcttgcagtgagaacttaatgattaccagttgcatatctatagggaagactgaagtgtcttctgtgatacacaaaatgattttattttatgggacagggacttgttctgtccccaggctagagtgcagtggcacaattatagctcactgcagccttgaactcctgggctcaagtgatccttcctgcctcagccttccaagtagctggtattacagccatgagccaccacgcccagcaaaatgctattttaaataatctttgatgaatagtacttgtagctgatatggtagataccataggtcctaggtgcttactgtcttgtatatccaaagtggctgaaaaaagttaccattacctatgtaagtctagataattgagagagtggtctcaaagtggggcatgtgcatcccaagaaatgtgtaaaatgatccattagggtgtaaaacatatatattacaaaaaaagtayatttatcttgccctttcctacttcaaattttgtaaatatttcataatttgcataatacataagtataatagtacatgtatataatttacaaatacataaatttcattagaggcaaactttttttttttttttacttagaagacagacaatagaaaaaaattgaaaattattaacaattctacccaaaaatgggagataaagttagagtacatatatagtggacccaatctgagtgttttctagcatgtctagaattccagtattttaatgattttatcctgttataaacacttagaagctgatagataaaagaggtaaagaggctgctttatgtaaggttgcgggaagtcagggaccccaaacggagggaccggctgaagccttggcagaagaacctggattgtgaagatttcatggacatttattagtcccccaaattaatacttttataatttcttatgcctgtctttactgcaatctctaaacataaattgtaaagatttcatggacacttatcacttccccaatcaatacccttgtgatttcctatgcctgtctttactttaatctcttaatcctgtcagctgagaaggatgtatgtcgcctcaggaccctatgataattgcattaactgcacaaattgtagagtacctgtgtttgaacaatatgaaatctgggcaccttgaagaaagaacaggaaaacagcaatgttcagggaacaagacagagaaccttaaactctgaccaccagtgagccgggcggagcagagccatatttctcttctttcaaaagcaaatgggagaaatatcgctgaattctttttctcagcaaggaacatccctgggaaagagaatacgcgcctgggggtgggtctctgaactggcccccctgggcgtggccatctgttatggtctgtagactgtaggggtgaaatagaccccagtcttgcatagcgctcccaggcttattgggaagaagaaattcccacctaataaattttggtcagaccggttgctctcaaaaccctgtctcctgataagatgttatcaatgacaatggtgccggaaacttcattagcaattttaactttgccccggtcctgtagtcctgtggtctcgtgatttcaccctgcctccatttgccttgtgatattctattaccttgtgaagtacttgatgtctgtgacccataccctgttcgtatactccctccccttttgaaactccctaataaaaacttgctggttttacggcttgtggggcatcacagaacctactgacatgtgatatctcccccggacgcccagctttaaaatttctctcttttgtactctgtccctttatttctcaaaccagccgatgcttagggaaaatagaaaagaacctacatgactatcggggcaggttccctgatatcgtaatgtcttaaataacaaaaaaaaaaattattttggcatactcaatatatagaagaaactttttttggagacagggtctcactctgtcaccaaggctggagtgcagtagcgtgatcacggctcactgtagcctcaacctccctaggctccagcgatcttcccactcagcctcccaggtggctggaactacaggaacacaccaccatgcccagcgaatttttgtattttttgtagagatgggcttttgccatgttcccttggctggtctcaaactcctgggctcatgcaatctgcccgcctcagcctcccaaagtgctgggagtaaaggtgagagccactgcacctggtctataggagaaacttatattatgttcgtacagatacatttgcatgaataaacaaatatacagtagaagactttccatggcaacattgttggtaatagcaaaaagaattggaaataaatatctattaacatatatatataattgtgcatttaattatgaaatccacattgttgttctaataagacaaattttccaatatataatgtaaagtagggaaaaagttgcaaaactatatgaaattttatgatccaatttatatttgtctttgtaagtgcgtgggcaattgaaagaagggtacataacccaaattgtggtgagctgtgagaagcagagccagaaaatcaggaggcgggaagaactaggggaagagggctttctttttcatttgcttccttctgcattatttgaaaactttagtataagtatgtattaattttataattaaattaacattttaataattaaaacaagatattgttttctttgaattaatagatatttatatcatagatatgtctattcaatataaaatgaagtgagactagaacagtaaccacattatttgaataataatgtaggcagacacagtcatgaagaccacagagataccttcaggtatctacttcagaataacttagtgccaaaacttcacttttaatctatgctgtgtctccataactgatgggataagacctactacattaggagggttgctctgcttcactccgtcttccaatgtaaatgttgctctcatccaaaacacgctcagagaaacacccacaataaggtttgaccaaatacccaggcaaaccatggcccactcaacttgacatataaaattaatcatcacaaatactatcagaaagtgaaaagacaattcatagaatgggaaggcatatatgtaataagggtctagtgtccagaatatayacataattttacaacgcaaaataaaaagacaacccaaattaaaaatgggccaaggatttcattaggcatttatccacagaatatatataaatgtccagtaagccaaagaaaacatgctcaacattgtcagtcattagggaaatgtaaccaaagccacaatgagatacacttcacacctactaggatggctattattaaaaaaaaaaaaaggcagcagcaagtattagcaagaatgtggagaaattggaaatctcagacattgcagatggaaacataaaatggtacagccactttggaaaagaatttggtagtttctcaaaaagttaaatgtagttaccatataacccagaaattccattcctaggtgtatacccaaaagaaatgaaaacatatgttcatgcaaaacttaaacacaaatgttcgtagcaaaataattcatactagccaaaagtagaaacaacccaaatgtctatcaactgatgaatgaatacacaaaatgtgggtgtatccatacaatggactatattgtgccatgaaaaggaatgtagtactgatagatgctacaacatggatgaaccgtgaaaacatttatgctacgtaaaagaagtcagacaagacacaagaggccatacgttgtatgattccatttatacgaaatgtccaaagcaggtaaatctacagacacagcatgtatattagtggtttctagagcctggagagagagagaaatacagagtaactgccrgtgagcagggagaatttttttggggggagtgaggaaaatgctttaaaatttattgtagtgatgcttatacaactaagtgactataataaaaaccattgaattttacactttggaaatgtgaattttattgtacataagttgatctcaataaaaaagaggagrgagtatatataactttagttttctatcataaatattactcattaatattatataaaattggttgggaattgcttctgggcattttttcattttgtttgatttggttaaagcatgctaatttagaacatttttatttctggaaaagcaaagggatatatttcttatagcaagcataaaaacgtcctttacgtgacaaatttcagttcactctaaaatgtgtatattttgcattccagaaatacttattttttaccagtctatctgctccttggacataatatagataataaaacacagtatcaaaaataaaaactctttacttcatctggtatgcctaatatctgcacttgagtgaatggctatttgattttcagggttatcttgcaattattttatctgacactggatgaggaaggacccagaaaaaaatgaattattatgaatggcatcaaatcaacaaatcccagttacttatggggagaggtttattttaactattggcaactgtgttaaataatttatatttaggcattcatccatgtactaggcatcaccgataacatgattgtgtatttatactggcaagaatctgatcacggtgatcaaatcaagtgcattctcttcatttaattctaacacagcccttccaggtaattggcgccttccttccttccacctgaagactgatgatactttaaatataatctgtggccacagagtaacccagcaaagtcattgactctccactggccaaaaagaagccactccctactctgaaattccaaggtgaaaggccagtgacttgtagggagcaaaggtcatcctggtttatttgcaaagcacctaactgaccaaagcccacgattacatggcrggtggtacacttttaaatgaacactgaacaaacacagagatgtatatttaaataacttactgttcttgggtaaacatttggagaaactctggagagagtagattttcataattttgattgagagttcattttaggtaaaggcagaccttgatgtaccctgcttaatgacttaagatatctgctttttatatcaaatgactgagatggaatctagaatctttcagatagatattaaagggtacttttaaaaatayataatccttggcataaatgtaaaaattttctttgtgaatacttaactttataaatgtttctttccaatgactaaaaacaaatttaaggatttggaattaaaataaagggctcttttttgacttctatgttaagttcaggggtacatgtgcaggtttgttacgtagataaacttgtgtcatgggggtttgttgtayacattatttcatcrcccaggttaatacctactaccccttagttatcctactayccctaaatataaataaatatactaaatataaatatactaaataatcctactaccccttagttatttttcctgatcctcttcctcctcccactctctaccctccaataggctccagtgtgtgtttttcccctctacatatccatgtgttctcatcatttagcacccacttataagggagaatatacagtgtttgattttctgttcctgtgttagtttgctaaggctaatggcctccagacccatccatgtccctgcaaaggacataatctcgttctttttttatggctgcatagtattacatggtgtatatgtagcacattttctttatccagtccatcattactgggcatttakgttgattccrtgtctttgctgttgtgaatagcgctgcaatgaacatatgtgtgaatgtgtctttataatagagcaatttatattcctttgggtatatgggattgctgggtcgaatgatatttctgtctataggtctttaaggaattgccaccgtgtctttcacaatggttgaattaatttacactcccaccaacagtgtataagcrttcctttttctccacaaccttgccagcatatgtcattttttgactttttaatagtagccattctaactggtgtgagagggtatctcattatggttttgatttgcgtttctctaattatcagtgatgttgagatttttttcatatgattgttgactgcacctatatcttcttttgggaagtgtctgttcctgtcctttgatcaccttttaatgagattttttttcttgtaaatttgttaaggttccttatagatgctggatattagacctttgtctgatrcagagttggcaaaaattttcccccattctgtaggttgtctgttatactctgttgatagtttcttttgctgtgcagaagctctttggtttaattaaatcccatttgtcaatttttccttttgttgaaatcatttttgacaycttcatcatgaaatgcctatgtccttgcctatggcttgaatggtattgtctggattttcttaaaggatttttatagtttgggtttttacatttaagygtttaagccatcttgagttaatttttgtatatgatataaggaaggagtccagttttaattttctgcatatggctagtcagttctcccagcaccatttactgaatagggaatactttcccattgcttgtttttgtcagatttgttgaagatcaaatagttgtagacgtgcagccttatttctggcatctctattctgttccattggtctccgtgtctgtttttgtcccagtactatgctgttttggttactgtagccctgtagtatagtttgaagtcaggtagcatgatgcctccagctttgttctttttgctcaggattgtcttggctatttgggctcctttttggttccatatgaattttaaaatagtttttctagttctgtgaatagtctttctcaaaaattgttgtaacagttaaatgagataattcaggtaagccatttcttacaaacttggcttaattaatattaagtgccatcattgaatctataaatcattttgggtagtatggccattttaataatattaattcttcctatacatgaacgtggaatgtttttccatttgtttgtatcatctctgatttacttgagcagtgttttgcagttctccttgtagaagtctttcatctccctagttagctgtattcctaggtattttatccttttggggcaattgtgaatgggagttcattcctgatttgcctcttggcttgactgttgttrgtgtacargaatgctagtgatttttgcacattgcacattgattttgtatcctgaaactttgctgaagttgtttattcrcttcagaagcttctgggctgaaactctgggttttctagatataggatcatgtcatctgcaaacaggatcatgtcatctgcaaacagggatartttacttcctcttttcctatttgaatgctctttatttcttcctcttgcctgatttctctggccaggacatccaatactatgttgactacaagtggtgaaagcattcttgtcttgtgctgattttcaaggggaatgcttccggcttttgcccattcaagtatgatgttgactgtgggtttgtcatatatggctcttagtattttgaggtatgctcctttagtacctagtttattaagagtttttaacatgaatggatgttgaattttattcttttctgtatctattgagatggtcatgtgattttgtctttagttctgcttatgtgatgaattacatttattgatttgtatatgttgaaccaaccttgcatcccaggataaagcctacttgatcacagtgggtaagctttttgatgtgctgctggatttcgtttgccagtattttattgaggattagtgtatcaatgttcatcaaggatactggccagaagttttctttttttattgaatctctgccaggttttggtatcaggacaataggtgtcatttctggccttacaaataaatgaatatatttaatttatttgtaatgatcaggattaaaagggttctttggtagttgattgcataaagagacaggaggttattcattgtattgtgctacttagaaaatgccgtgtgtgtgtgtgtgtgtgtgtgtgtgtgtttgtatttgtatttatatttaaatcagctgaaattcaaagaagacttctcatttcacaaggaatggcttagtcattgagatttattaatttttttagcatctttttcttaaataattatataaactaggaaaaattaacttaggaactaaaaatagaactactatcattttgttattttgttgaaagggaaacagcctcctcaccatgartgacagtcaaaacaataccaaatgacaaaaaaaaaaggagtaaaaattaatcatccttggttacaaaacaaagcagtacattttcttcctttttctgaataaaattaacataggatgtaactttaggatgttaatgctcagactttattgatgcttaaacaagattcaaactgaatcacaactgtaacatttacctatgtaagcttggcttctacactccaaattttcagactcctgtttaatatagtccccccaattcctgtattttcagaggactggaaaaaccgtcaaagcacagtaattacatatagcatccccctaaccaattcatttgcaactattcatccacgcagatgccaaaagtgttgctctccatctgttcatgactgggtacaacaggagaactcaagtcaaagtctttggcctcaatgtgttcacactttactgcaaatcatttctagtgaatatgatatatattggatacatattgggaaaattgctaggaagtctcagaggaaagagcccctggcatttggaggattgaacctgaaagtgttggggcaagcacatttgaggcatagagaacagaactgcaggtagattgtctgcctgggacacaggtccggatgagaatgtgacaggagatgaggatggagaaatacacagtagatagattaggaagcatcttacgtcaaaagggtagctacttgcrggttttatcatattttcagtgctcagatattccagtgaaatctggaaaaaatctaytgaactaggagattttagagttaggaagccttgctaaggaacaactgcaaaggtctgaaccaaagaggaagagagtttgagctacatcaatatcagcgagctccaagagtctgtcttcatgcctcttccacactgcgagtgcccactgacttctccaaactcaagagattttgagttagtttttaagacttcttgactgaaaagtaattagggaaatgcacaaacattgaagtacaaggatgttcattacagttttgtttataatggtgaaaaaattgaaaatgactcaatgtccaaaaataaagtattggttaaataactatgacacatctcaataatgggatactatcaaatgtttgaaaacagtgtttaaaaaaatttgaggacatgaaaagacattcatgatatagtttttttaaaaagtaaatcatatgcaatggttctgtgcctacttcctttttttaaaagtaaatcataaaagaatatattgaataaaaatctagatttttgtcatacatataaggacttgaaggacatacacaaaaaatgttcttagcagttactctaaatatgggtattatgaaatttgtaaaatctctatttttagctttagttaacatgcattatttttgaatcatgaaaacattgttaactttaaagacattaggtataaatgttaaggacttgaagtatgaaaaatagtcccaacttagaygaccattgattttgcatgtgtgatactgctgctaactcttaatcactaaccaattttctcaactttacctccctcaaatgttcatcagtgtgtactcatgtagctcccacatagctgtgtaaatagagagtgaagcaaaaatcaccatgttattattaattatgataataattcatatatgtttattatatcccagacattagggtggaagtattcacatattcttgcttatttatcttttatggtgtgagtcaattttgtgagttttattattattcccatttgcagattatgcagtctaaggtccaagttgcttaagcgaaatgcagaacaatgattgaacgcattttccaaggtcaatatttcaagagtaatgtgacaagttcaatgtatctggttcttttaaatgattgttttgaattttttttgtaaaataagggtgtagtaaattttgccttgtcctatacacatataaaaggtcagacatctttttaygaattcaaaacttttatagattcaatcaaaaggcatagcaacattctacctagtgaggtgtaggtcctttcaggtaggaaaatgratcatttcctacactaaaaatgttctctatgttaaaakattttctttttactttagggtgaaattcatatatcatcttcctgggttcatgcctggcatcttttatatttattattatttcttcccttcaggatttcctttgggaaattttattatgaatggtcacaatacctactcatttatttcagttctcraaattggtaacactccatttatgtcacaatttaactttcctagtggtccgtgtttatttctgttttatcctatcatctttcaagtgatccagaaagagggttggtactatgtataatttactggaagataaagagatggaaacagcataacattattaaatgccattaacctcggaacttaaaagtcatagaaytgggagttgcaaaaactgcytatgccactcagtccacacaaagtaaaagaattccatctctccatttctccacttttgtctcctttgttattcaaatgagcaaaaacttgtttttttttcctttttcattctgtttaagtagagttattctagaaaactatgtagaaaaattgtatgtgcaaaattaaataagttgtgggtgagagggtttaaggtcaccttttatgatcaagccaagattgtcagattcatggccactgtaacacacaaggatgaatagttggactaaaggattcaagatcacattttcagttctgaagacaacatcaacattaaagttcttgcttctcaccacataagatttgacgtgtacactaatgaagacaactccagacaaattatatatacttttyacagaaccaaaaaaaaaaatctcggaagtcaaatctgtttgctttcattctgtactaaattcttcttataatctttaaaatccatatttttccgttctcatttcaagtatttcaagataagcagctgccaccatttcccactgaaacttaatttcataatccaacagtttcaaaagtacatcttccgggactacaagaaaaaatgatcatctgtttcattttgtcctcttcyatttccattctttattggttkctaaatgaggtatactgcttgaagtctcactgttctcagtgaccaaagtactgcaaaaaaagtagcatgtctgagaattagagcccgtagacatgatactagaaattttagccctttcttcctaaattcagcttctaaaatctagcattatggtccccaactaccgggaaaataaatgcctggtttctgagttattccaacactcagttgtaatgttactgtatttttagctacgttttcttcccacctctaagtcattagaaactgatgtcatwagaattgaacaattttgacccaaagttgtttatattctcttgctgaaatggatgtgtcgccctggcccataatatttatacatattttcctttttagttaattataattagcatgctgtttattgcattccttttacctttccctaagaatttgctttttccttcaattgtttgcattggtatcttttgaatttcctccctcttatttattttttggcataaataataattggtgctgcagcaggagcttgataaagctttttattatgttcccttttgtccaacagcaatcatgaggcattaaaaaggctaaacagtttgcccacagttccaagacaaaataaaagtaaagctttcagtagagttcgttttcttgctttccacattccttttttattaaaggtatagttctcctattatttatgttgattttttttctaaattctgtcaatttttttatacgtcttaattagaattttcccataagtttatatgtttatcttgtttttgaaatgtctttctgactgtaatatataaatggttattatttaagtcagttagcatgaaaatgcttccacagctctctgcttaccacagaatccttagaaaattaactcattaaatcaaatagaccttagacacgggatgtcaaaggcttctaatctcccaggtttaggcagcgtatactgtgggaagtcaaaacagaaattaatacaccctgatgatgttctggatcctcttttatctggctttttttttcgttatttatgtatttatttatttatttatttttgacatggggtctcactctgtcacccaacctggmgtacgacagtggtgcaatcttacctcactgcagcctcgaactcctgggctcaagcaatcttccggcctcatcctcccgaatagctgagactacaggcaagcaccacaacacttagctattttattttttgtagagacagggtcttgctatgttgcccaagccagtctcaaactcctggcctcaagtgatcctcctgcctcagtctcccaaagtgctgggattacagatgtsagccaacatccctggactatttttgggctttttatagtcttatagtgtctatgactgttgcttctctctcatctctcttacataagcctgctccccaatttcaaaatacatttttatacaagagaactctagctcaaactgcttctatgctgttcttcaaagttgtattaatttattctcctacactttttttcctaccagattctttaactctagaccaaaaactcacctattaaacgtttgctttcaaagcccaacttaaatgacttctacctcatgaatctgctctgaccactccagatggaagagatctcaccatctatagcacaagcatcactccattgacagagggcagacaattttgtctcttgaggctgaaaatttgactgaatggcatggtgattttaaagggcataggactagccatcccttaagcggcctctctcamcttcatactaaaatatctataaagcttgcaaaagctgaattctcacaaatgccctaaatattaagaccaatcggcaaactattatcagaatccgtaaggattttctatcaatttgaagtccagaactgaactgaaaaactttaaaaactactttcccactaaaaatagattaaattcttggtccatgagtagaaccattctttgctcttcttcaactatttgcctcctactcagaagcacaggaaccctatcaaccaccaccaaaaaccaaataagaaaaagtggagtgggaaaaatatccctctattaggtaggcaggattttatgagcatctagaataaatgctattccctaatccctaacccagtgatccaaaagagttaagaagaataataggatgagaaaaagttttcagaaacataccccccaaaacatataggcatatcaatattcattttttaaagccagatgtgagggcaaatataaaattaacaggaaagaaagtaatattggtaacatttatagtgaagatatgactaaatcccttcaaataacacaatggctgcaatgtacaaggtaaaaactgttagaaggaaaaataacaagcataattattgtggaagactcacatacatatctcaggctttgacaaatccagtagaaaaaaaaaaaggaaggaaagaataggttggaataaagtaatatcttcaataaaataatggtataataaataaggtgatatatatgtatatatgtgcagatagatacttatgaacatatacagataatcaaactagatgccagcaaaacatctgtgaaatatttagaaaatgatgtagtgtttatctcgaaaaaaaatcaagtagtttcaaccattaaaaggccagccattctctaatttccacaactataactagaaattataaggaaaataaatgtctaaacttacagatatccatcaaattaaagtagaaattaaaatctcaaytacaaaccatttagaaattaacaaaaatgacattacatatcaaattatagaatgacaacaaaaatgcaaccagaggcagattcatcagagaagaaaactgatagattttcgttaatggattttgttgttgttgttgtatattccaataattttccactgtttgaaattaagctcaagccactgtaatatttcttaatgtcgcattccagagtaagtattaaaataccagagggaataatttgctgggcctagcatctactcttactgtctttactctcacatattttgrcctgtttttccctgctctctacttccttgagccgccaactgcttggcactatatttgatctgacacacacctacggcccctttaaatgtaacagtttttgtaaacaccatctctgacttcaatcctcagtctctcacatgctatttcatagttaccccttggtccacacagctaatattacttgtaaaaggcatcctcacttcctactcaggactcagggtctgtgtaagttgtaagagcatccccttgccccccagcgggaaaaggggaattatgagaggaagataaattgtaactcattttaagggtctgtgatttctatggccccttataagtttaccacaaaattaaatgaattcgtgtgtcaattcacataygcgtgcatacatatacacataaatagaggatacagaagccatctttttttatttttatctattgttttatttatttattttagagccaaggtctctctctgctgcccaggctggagtacagtggcaccatcacggctcactgcagcctcaaccccccgggctcaaatgattmtctcacctcagcctccctagtagctgagactacaagtgtgggtcaccacatccagctactttttgtatgttttgtagagacagggttttaccatgttgcccaggttggtcttgaactcctgaactcaggcaatccacccacctcagcctcccaaagtgctgggattgcagtcatgaactacctcatctggccccagaagccattttttaggkattcactcagaagatatagatatagatatagcttttcctaatttttttttacttaatttttcacttaatattattagccaacctatgatttctgtaataagtatatgcattcataaattatagcatattttctcaatttagagttctttccaacaacaaaattgttattttcctgtraaggaactatgggtagttgctatggccaaccatgatactaaaagagaaaatatagttggttgttatttctgtaaaagttctcactgaattgtgtgcatgtacagaaagacaagtttttgcaatcaaaataagtatgtggtgtttaaacataacattcttctccaatgtagaagagggtccaacgtatctcttacattggacatgagtagcttggggaacattgaaccctttgtgtctataccaacaccacgggagaaggtagcaatggagtatctgcagtcagccagccgaattctcacaaggtctcagctgagggacrtcgtggcaagttcacatttactccaaagtgaattcatggtgagccttctatttattgttcactcttcagtcggtattttgatacatggggcactagagacgtatggaaatgatactgtcctatacttaagcagtctrcagtaaacaaatggcaaagtgaaatggttttagattcactcagtctcatccactattgataagtattaaaattggaatgtagagctaaattaaggcagaatatgcaagaattggygaggcaaataagtggtatagggagctgggcagagaaggggcattccaggacaaagaatagccttgctgtcactgtctggggaattaaactgttcagtttaactggaacattgaaatcaaggtgggaagtggcaaaagttgagcctcagaagtataaaagaaaccctagccttaatatatgtttaggagcttggactttatcttatgttttggatagatcattctatttgcagtggagtaggcactaaaagggagcagtttagaggctctagtgttaatcctgtggaactgcgttggtggcctaaactaatatagtagaagggaaaatggaaagaatctgtaggaatctacaagaagtgggattaattgaatgaggcagccaaaagtaatggaaaagtcagggattgatattcgtgtttttggtttggccaacagggtgcatatggtgccctttaacgaaataaggaacacaggaggaagaccaagtgtgggctaaaaagaatgatgaattcagttttagacataccagtgttgctagtgaaagcttaaagcatgataacatayatcaactcagagaacatgaagtaagattaaaccttcttaggtctaattgttgcccaaggagaatattgactttgttgatcacctcttgcatcttaagccgtattggttgagtacaataaattgattattagttcaggcatttgcagccatcctaatggtgacagattcagcaatgggttggatctactattagccccatcaactattattaagtgtccaaagtaaaatacaaacatgaaaatcagactctgtggtgtatcatattttacatgtgaagaaaatgagacctgtaggaatgaaagaacaagtcagtggtcacacagctagccaaaggcacacctagagctttttttttctagaactgcagacagctctttgtttatgaaataagaccttaccatagcccactttcctgaaaggaaattgaaggccagaaggagtacacaggagaaagagaatgctggaagatgacagactgtcagtgtgtgtcagaaaacagaaggtgagaaggaagaaggggaggaataaagatattacctttgtggctttgcccaaagacactgacgtgcttgaaattaccaaacatgaacatgtgttttccattgaatattcaacaattttgcttatttttataacttggaacaaacaggttaaaacatttagttggagcagagaatagggataaatatcatggatagctagcataatgcaggtaaaggaaaaattattttaaaaataagtaacttggggccaggtgttgtggctcatgcttgtaatcccagctactcaggaagctgagatgggaggatgccttgagcccaggagtttgaggttacagtgagctatgattgtgccactgcacactgacctaggtgacagagtgagatcccatctctaaaaataaattaattaataaacgaatagctgtttctctctgtagaacaagcctcaaattcatagtatagtccagcttttctcaaattttcagaatgactgaaaactaggataatttgaatgaatttaaagatgatttcttctatttcaatcaatattagactgttaagttaaattttctactggagaaagtttaagtagtaaaaatatcttatttgatcaaatatttaatgtttatcagtcattaaataacataaaagttattttgttcatgttaatcttatcaaagttagagaacatactattttgtataatcaaatctttaaacaaatgtttgtttggacccttttgaaaactttggcttgttgctttatttgtcctggttagctacagatacacacctttttagatctaatgcacttacatacagccactcttttcctattgttccctgtccaatcacttgaggcatataatgtatactctgataaaataagaatagtaatgttcttaagtgggagaaacagtgtttgaatgcccttcactaaaaacagtgcatttataacttaaaatggaacagtccagttataaaccatttcttaattcaaaaaaaagtcatgtcatcacttgaattaacaaaaaagccctttatatttaccattttgggaaagaggttttaataatcctaaaagagtcactattagtgtgaaaagataatctattatagtaaaatttttggtactaaagttatgtaaaaactggaatatatttgaatacattgttttttaaaaaaattcactttttagcatctgtctaatctttctagcaattatgtcacagcaggattcttaaaatctaaccagtgttatatgtctccttactgactacatattaagcaatattttctaacacacagagctgtttcttagaagtcagcttgtccggatgcagctgatatgtttaggaaaggaagggtgttggtccaccagaggtgctagatctgttgtttttaagtggctttgaagtccartagaactctggatcagatgyccccctgtgaagattttctttgtggcagtattagatacactaatttgatattatttatttttgcaggaaataccaatgaactttgtggatcccaaagaaattgatattccgcgtcatggaactaaaaatcgctataagaccattttaccaagtaagcttcttgattttataatttgcattgtatggggggcaaggggagggatagccattaggagaaatacctaatgtagatgatgggttgatggatgcagcaaaagcaaaccacaatggcacatgtatacctatgtaacaaacctgcacattctgcacatgtatcccagaacttaaagtataaataataataataatttacattgtaaagcacaagacaagtcttcccattaacccttacctcagcatttccaattcttacaacacccacttcatatcaaatttggaattacaaacacatgtcaagactaataatcattaaaactatctgaagttaatgattttacctttttactcttattataatgtccaggtcacaattccaatagacacatattctaaaattttgttgtgccacacattatggctacctgatttttgtcaagggtcaaacaattcaatgggaaaaagagagtcttttcaacaaatggagcagaaacaaccagatatccacatgcaaaaaaatgaagttgaagacaaaaattgactcaaaatggaccagagacctacacataagagctagaactacaaaactcataaacgaaaacagctgtaaatctttatgaccttgaattagtcagtggtttcttagataagccaacaaaagcacaaacagcagcaaaaaaaaattgaacttcattaatactaaaaattttgtgcttcaaaggataccttcaaggaagtgaaaagacaactcatagaatggaagaaaataaatatttgcaaatcatgtatctaataagggacatgtagctacaatacgcaaatcttacaactcaataatagaaacacaaacaacccaaaaaatggacaaaagatttcaatggatatttctccctagaagatgtacaaatgaccaacaagcatattaaaagatgtttaacatcactagccatcagtgaaatcaaaactacagcaagatagtactttatatccatgaggataactataattttaaaaatagacaataaaaaatgctggcaaggatgtagagaattggaaacttaacactacagttttaagtacagctacagctacttaggaaaacagtttggcagttccttaaaagataaaactgagttgctatatgacctggacactctacttctaggtaaatattacctaaaagaaatgaaatgtgttcacacaaaaatgatacaaaaatatttataacagcattattcataatagccaaagagtggcaaccatcagctgagaaatggatagataaaatgtagtatagtcacacaatagaatcaataaaaaggaacaaggcactgatgaaccttgaatgaaccttgaaaacatcatgctaagtgaaagaagccaggcacaaaagacctcatattttgtagtccatttatatgaaatgtccagatagctaaatctatacagacagaaaatatcttagtggttgcttagcattaggggatatggagaatgactgctaaaggacctgtatttattttggggctaattgaatgttataaaattgatttacagtgattgttgcacagctctgtgaaaatttaaaaaaaaatgctgtgatggcacatgaaatggggggattgtatggaatgtgaattatttctcaataaaactattaccaaaaaaatgttgctgtgcatgacaatgacctggagtccttgttagtcctgtgcccaaccccagggattttgtttaagtagatctgctgttgagcacagaaaactacttttagcaaacacctaggtgattccaatccagatgaaaccaggatccactttgagaaccactactatatgtgaaactagattgagcttcatggaatttattaacgtcaagcaatgacctgaatgccagggaccagtaagaaataagaaacagtctataaaatcaaggaggtcacagactagaaacgagagtcatataaatggtaattatgctcagtgcataggccagaataaagatactgcccaagcagtgtaggagttcagagaggactgagtaattaattctgtccagagaaattaggcaaaaaaaaaaaaatggagaggaagtaatattttctatgactaaacaaacagatatagttggagttttggcaaaatcagtaaacatctcacgacaaagctcaggaaagatggagccacaaagtctttttaacttttgacattgaaatagcaatcttcataatttagttcattaattcattcataagacaccaaattctttatattcatagtaatggtgatgtaataaagtaattaaacaattactgttaatactatctttggccttccccttctggtggaattggaaatacattgttaaactataacatatttttaactgctctatatagttaaatttatttacctaaggtagagtcaccattgaaggttattttatgactatacttggccaaaggggatgaaagtgctgcgtgttagaatttgtgttttctctctccctctctctctctctgttaaatttttatctaaaatataccaaacataagtaataagggaatatacctccatcacaattatatatacccaaaccatcatctaattttagaaggatttggaaattattagcattagttcaaagttcagccttctccatttcctgcccagatgatatcagacaactgcttcatagtcctgtgtcagtttttccgttcacagaactgggtggaccgctggattcagggcacctgtgctgacagctgatgttgcaaatgatggattttctgttgaaaatgtctgcaggctgaatgccccacccaccaccctctgttgcacaaaatataatttaggaaatatagcttagaaaagccacactattgggtgaaagcatccaaaaagcctggaatgaatacacaaagatgttctttatggttttagactgtaatatgagataaacttgaaatattacataaaatgatgattattaaatgatcaagaatttaarcattatgattgtttttagttttaacctacactaaactcttcttagttctaaaagcttgacagcttgtacataatagcaacattatacaattctgagaatgccttgcaacagatatatggataggcaagaatcaattatgaataaatcaatttataattataaattaaattatagtcatttctctaatgacagtgttatcttggctgagattaaaatgctaaagtcaagtttatatcaaattattttgcagtgtaaacaaatattagtgataaaaatatgtctacatcctaaatcacaaaagtagtaggaaaaaacaatcatacatcaatagaaaattattagcagacaataaaatataatactgtaataataatcatacatcaatagaaaattattagcacacaataaaatactgtaataataagtttaaattttttatttttactttagattcaggggstacctgtgcaggtttgttacaagggtatattgtgtgatgctgccgtttgggcttcttctgacggcatgacacccagagagtgaacatagtacccaataggaagattttcagcccttctccctttccctccctccctttttttggagtcccagttactattgttttcatctttatgtctatgtgtatccagaatttagctctcacttataagtgagaacatgcaatatttggttttctgttcctgtgttaatttgcttagaataatggcctccagctgcatccatgttgctgcaaaggacatgattttgttcttttttatgacttcatggtgttccatggtgtatgtgtaccacattttctttatccaatccactgttgatgggcatctaggttgtttccatgtctttgttattgtgaatagtgctgcactataataataaattgtatgcatatttcttttatgcagtgtgttgatacaaatataagataatatagatacacttaaagaatgccatttactcaggtcatcattttatatttaaaattttaacatctaataatgtttcctacttaaattatgtttccttttttattatataaagtacctagcacagagtagatatgcaaataagtgaaccactcattaaagcaacaagttatgtagctaaagcaagatactggaattagatttgatttcctaccccaacaaaaacatttataatttttggcaggatatttaatctccctatgccatcctttattcccaaaagtagtgataacaatactctcctacaaggctaccgagaaaattaaatgatagtatgtgtaaaatgtctgtcaaagttccaactaatagtaagccctcagctaatgttagtttctctttccctccctatctaactgaagatgaatccatttctaacctcagaaccaattccaggaaataggggtaccatctatgtatagagaagtttacagttttaaaagcaaagtactcaagagccccattttcattcatttataacagtagtgatgaaaacgatgatgattatacattttttgtttaattcttggcttttttttttagtacaagctatatattacaagagtttttcttggaaacctacatttccccatactcagttatatgttgtattcttgcatttgtaaaaggaagtagttggagccacacacagtggctcatgtcctggagtttgagaccagcctgggcaatataataagaccccatttccacacacamaaaaaaagtttaattactagcctgggcaacatggcaaaacctcatctctaccaaaaaatacaaaatgtagccaggcatggtggtgcacatgtgtggtcccagctacttgggaggctgaggcaggaggatcacttgagcccgggaggttgaggtcgcagtgagctgtgatcacatctgggagtagccactgcaattcagcctgggcaacaaagtgagactcccctctctgaatttttaataaaaaggatttggaaacttctaaatacttggaaaatactgtaagttactaattaccaacataatttagctttacagggaaactgtttctaagcagtttttagctttaccagtaaatcatatacatcataggcattataaaaactgaaggaagcaggcctcttttcaagcctgaatggtgtaggatgtttatggaaacttctaacaatcagtggatactgaaaggcatgaaagatttcttgtcctctttgctaagaaaagaaaaaaatatctagaaagtcaaaaacagggctttaactctttctcatagaaattaattctgacattaaaccctctgtgagccacatcccaaatagaaatcacaaaggatacaaaagtgaattaaatacagcctttgccctctaggggctcaccacactccattgagggcaggcagaaatttaagcacttaaaatacaagatgataaatactaaaataaaactcaggggacccaagcaaagaagagaatgcctaattctgcctgggaaggtcagggagaacttcagaaagacagtattttctgaattgagccctgagtaatgaggaagactttaccatgcagagaaggcaaaggaaacaatatgtgcaaaagcataaaatctgcaaaaacatagaacatttgggagattgccctaggtccatggggctagattatatgatacacgtgggaaagcagctgttggtgaggccttgggatgatcattaaggatctgctctatcttgctaagtacccctcttggcattcatcttctaggcctgcactgtcaagtagagcaaccagaacccacttatggctaggtcagtttacacttaaatgaattaaaattaaataaaattaaaactttagtttctcagtttttactagccacatttcaagtgcttgaaagctagaggctacattttttggacagcacagatagataatattttcatcacctcagaaaattctattgaycagggctgctctaaactgaattatcaataagtatataaatataatagttaagtatgtaaatacagtaggtataataaaattgagtccaacggacaaataggattatatacaataccttcttggaaattcacagggtccattaacatactgaagaccctgagaagtcctgcagtaaaaagaatatggttcagatttgtttaacccaatgtttcccatatttatttgggtactaacctctttttgtaaaagatgacttaatttataagtcatatagtataattctatatgttatagaggtaatgatttacaggtaataaatattttgggaaatactgctatgggcaattgggaagtatggatgacatttagacaatggaatcatgtgatcagattttgttttacagagcaccttgacagctatgaggaggatggattggaaaaaagcaagattgaaggcagggagaccaggagatacttgagtcctagtccaagaagacagccatgcaaacagagaggcaagacagaccccagcgtattttaggagacagaacaggcagaatatgctaacattcaaatgcacagaaactctacacggactgtagagctgtggcagcacacctaacctaaacaatagcagaaagctgtcaggaacacatgaagggcatgaggagtttcacaaacctgtggtccattcagaaggaaataataaatagaaaaagctggactataaatgaggagaccgggctggtctgaagtatgtatttgagagccctcaggatgtgcgtaataaagtcacaggaatgaatgagtcactcaacaaggcagtatcaagtgaggataaaagagggtcaagttgaatcctagaattagcaacatgaaaaggggcagattaaatgagcaggagattggaaagaggccaccgaaaagggagcaggaaaaccagaacgttgtgtcccagaatctaagggaagagaaaactcgaaaaaaggatatacagtcaacagtttttgaatgcttcagagaggacatgaacaaaaataccacaatgggatcactgggcttaacaacaagagggtcagtggtgaccttagcaagggcagtctctgcacagtgctagggttaggatagatcacagtgtacatgaggaggattgagttgcagatgagcatggaggaagtgtgtgtataataaactctttcagaagtttgcctgtctaaaaaagaaaagcaatagaataattgctagagaaggatatatagaactgacctttttttaaaaaatagaagagatctttaaatcagtgcagtagacattcactgaaggtctgctatgcaagacattagatcttataaagatggtgaaaaatccccatccctgccttcaaaaagctcagagtgtaccaggtcaaagaaatcataaagagacgaattagtaatattaatgtatgcaaatgatggtaaaaataatttccacattttccgtaacactttagtccacaaagagtctttcaactcttgatggaaagtgattttagaatttaagacaatgttgctagcactaaacgaatctaaccaatatcagatacttgtgctgtcagtgaacaaaccgctacatatgctaactaaagacagcttcttccaaatagtgaaaaagacttctgtccaggccatgtgtttgttgtaggtcagaagaaaggaaatcagtgcaataagcaatttagggctatccagactgaactaatcactgcgtgcattctaatggcaatgttatggggcctgrgggcttagttttagactaaaatgatgattaccttttgttatgttgctaaaacgttattttttatagatcgtgataattattggacatgcgaactccaactctaagaaaccctgaatttgacttctgaatatatacaaaccccagatgtttgggatgtacctattctattaatgcctccctaggcagaactgattttgtgataatactattcttttctgaaatatttttgccagaaaacttatatatactattaaccacaacccaaataacagtggtttaaataatttaaaagtgtttttccctctcaagtatacctgccagggttgatatggcagctttgccatgttatacctccagactaatctctctggttacctcgccatccctagggtattacctttgcatggtctaagatcctgatcaccatgaccacatcccaggcagcaagatggaatcagaagtggtagaagaagaacatcactcctcactttaatttcatgatctaaaagtcacgcgcatcacttcctctcacctgctataagtgaaaacttagtcacatggccgcaactaatgcaaggggtggtaagaagggaagtcttaagctgtgcatcctaccaagttctcagccagaattgggatcttattgctaaagaaagacagggatggtgactactaggagacgactagctcttaaartacatatttggatatgcgtactattgtgtgctccagctattgacagcaaaaatgccagacagcacggagcatgcttggcaagaagcttttagggcgctgtatagccaaaggctcccagcagggaacctcctccatgagattcttggtggagagtgtgcaataaatgttgtttgctccactgtggcttctcctccttgtttgttattttgtgatctgccaagagttttgatcaataggattgacggaagatacgtataaacaatggaataatttcactctcaatgttaaaattcagctccacaggtgttcaagaccccttggaggaaaaagataaggtaacaaaaagcagtctagcagaagtctttctacattacaaagggtgtaatagattttatgcagactgagaggttttaccaacaagggtagatttagttttttggaagggaggggagctaaagcttatattatttggagattactctttaggttttattttatttttaattgaaaataacagttgtatatatttatggggtaaaatgtgatgttttgatacatgtatacattgtggaatgatcatatcatgctaatattaatgtatccattacctcaaatatttatttattttttgtggtgagaacatttaaaatcccattatttcagctattttgaaatatataatattattattaaacaatagtcaccatggtctataatagatcgccagaacctatttctcctaactgaaattttgtatcctttgaccaccatctcccctttccccattcacccacccacctagcctttggtaaccaccattctactctctatttctatgagttcaacttttttagattccacacataaagaagaycatgtctctctgtgcctggcttatttcatttagcataatatctgtgaagtctatctatgttgtcacaaatgacagaatttcctgctttttaaaggccagatagaactccattatgtatatagaccatacttttaaaatccattcatctgttgatggacactccagttgttttcaaaccttggctattgtaaatagtgctgcaagaacataggagtgcagaaatgccttcaacatactgacttcagttcctttggatatatactcagaagtggaattgctggatcatatggtagttcattcatagtttttgaggaatctccatactgttttccaaaatggctatgctaatttacattctcaccaacagcctaccagagctcccttttcttcacaaccttgccaacatttatcttttatctttttgataatagcccttctaacaggtatgaagtgataytgtggttttaatttgcatttctctgatgatttgagatgtggaacattttttcgtagatctgttggacatttgcatgtcttgtttttagaaatgtctattcaaatctttatcccttttctaatacgattattttcttgttattgagtagtttgagtttctgatatattttggatattagccccttcttaaggtatgatttataaatattttctcccaatctgtggatttgctgtgcagaagctttttagtttgatgcaatcccctgtgtctatttttgctttcattgtgctttcagggtcatatccaagaaatttttrcccacatcaatgtcatggaactttgccctggaagacactcttaaaaaatgaatacaacattatgaatacaaaataagatacaaggttcttattgaaaatggctcatgcaagtgagggtcagtctgccsctgaccaacaattgtaggaaatgtagagatagatctgttaagactgtatgagatttgggggaaaatgaagtgcttttgaaagtttggtgctagcttccatctccatagggtctacattttgaaagctctgaaggacaagactgagattggacttatttccagaatgctttaaagagggtagtttgcttcagtaccagtagccccaacatatctcttgaggaggaattttgataagttcaaagcccatgtctcaagagatttccatgctgatgagcataggaccacaattccttgttcacagttaggttatatcctgattcgaacagtccttacctgttccactgtaagtttctctgtagtcaccctacttcctttaggtcacccaaaaggacatgctaggatcttttgcaaagtgttttggttcaaactgaatgaaagcctgcctcgatcaacaggattcttggatgccacctaagggtcttcccactgatttccagaatttattaacatcttctagacattgcttccatatggcatgatcaggagctattttacctgtggcctataagatcagataagcatcttggtcttcacaagtcaatctaaagctttaagcagaatgggactttctcctgccaaagccagatccsttatagctcaaatctactttatccatccttggatagaagctcctattacttgttttatttatatatataacatatatataaaatatctttatttcaaatatcctagtgacaaattagcaaaattttactatatattttcaacatcatctttgataatggccttgttaaattctaagtttggtaatctggtttcaactctctgcttcatttcttactgtgtgaccttgggtgagttacttaacctctctgtgctgmaatttcctaatctaaataaagagactgttaacagtatgtacgttatagaattgtaataattaagtgacctaatgaataaaatgctgttacctgctctacctgacacatataggagtcaacaatgagtgcaatgacaataacagtgatcatgatrtcactccagagttttgtgactgactccttattggtccctatattacctatttattgctatggaacaaattaccccaaaatttagtggcttaaaacaatacacatttatatctcacaatttctgtgtgccgggaattggggagtggcttagttgagtgtctggctcaaggtctttcatgagatttcaattgagttgttggccaagcctttggtcagctgaacacttggctggcactgagggatctgcttctaagagggctcattcatatgctatcagctggaggcctcagttccccactatttctctcttcattgggctgcttgagtgccctcaaaatatggccattagcttcctccagagcaagcaactcaagaaagagcgcaaggaggaaactgtaataccttttatgaccaagtcacacaccatccctactgccatattctatttaatttctgcccacattcaagatgagaggaattagtctctactacattcttttagaaggagtgtcagataattggatgactacatttttaaaccatcaccgtcctcatgggctggttagcctttttctgaaactaattatggcctttattatctttaaccccagttatatataaagtgaaatttaaaacaaatgttggcttgccaagtcctgttaaatttttaattatttttagctcccatttaaatatattctatgaaactttcttcgtctagtacttcctacctcacctcctctttgtctcagttttcgtggggaacgtaagagattgtgtttacccagaagatgttcaatgatagtgtgttactaaaaaaatatgggaatgggagaagtttttctttgctgcacccctgtttttacaccacactccactgagaaaggaagctgaaaagcattgaatttgctgttttttaagaaagtaactaagcaaccactaggatataacattttgtattttaatcgtcagcttacatagctatcttcgcatgagagctgcagcacagcgtagtggctaatggtaccctagtgttcgtgtggattcaaagcctgactccattacctacttcttggctgtgtacctttgggcaaattatttaacctatcttagtttcctatctgaaaaatggggaaggagtcttacccattatcttaggtacttttattaaagttacaagaaaattaaatgatataatatctgtaaagcaatgagaacagactctgacatctaataaacaataaatgtatgttgtttgttattttatgagcagactgaaaactcactgaaatgaatcatagttttttgttttgttttgttttgtttcgtttttgtttttgagacaggctctccctctgttgtccaggctggagtgcagtggcacaatctcagctcactgcaaccttggcctttcgggttcaagcaattctcatgcctcagcctcccaagtagctggaaccacagacataagccaccatgcctggctaatttttttttttttttttttttttttttgagatgaagtctcactatgttgcctaggcttgaagccccaggctcaagggatcctcctgcctcagcctcccaaagtgctgagattacagtgtaagccactgtgcccagcctcgaaatgaatcatgtttatctttatctttgcaacctccctcttcccctggcttgcctatcctcacacagatagcacgtaatagattattaatctcatccatctcggaagatcaggagatctggccaggacataatggtcagacaaggtgaggttcagacctgagggtctaaatgagatgagatagtaaaatataaataattggtagagtatagcctgatttacctccatagggaaaggagagagatgggagtgaggagacctggtacaaattccagatcaaaagtataagagtgggcgcaaaaatgagaaatgaggtcgagaaccggaacagatgagaaatggcctgaaatataaactcatcagcttaggcttatggatgagctttatgtcaggagtgaagacaggcccaaatgtccctcaataaacatatggatcaagcaatggacaccaaagacaaacattgacatgcaccagataatcaatacataacaggtttctacttactggttattggcattctaaggaactttaaaaagggtaaatctgtttaatatattcttttttgttttcttcattagatcccctcagcagagtgtgtttaagaccaaaaaatrtaaccgattcattgagcacctacattaatgctaattatattagggtaagtaaataagtacaaatttctttctggtgacttcctatttggaattgttggttttattttctttttcctagagtagattaagcttggtttaacttgattaccagcaagatttcattttgtttggttttttatcttagtcataatcaacattgttaatgggtcttttatgatgactttcctttcactgtgagtctctggcaacagtgctstatatgggtactctgctggggactgggcattacaaccctcagtaccatgtgctatccttaacttgctgccaaaatacccayggaaattgttgtactagagtcagtgaagccgtaacctgtgttgcttttgtactagsscagctatttcrttgaagatctttcacctacactttcactgcaaggcatgaacttaaaaaccaatatttttgtttctttactccatctagggctacagtggcaaggagaaagccttcattgccacgcagggccccatgatcaacaccgtggatgatttctggcagatggtttggcaggaagacagccctgtgattgttatgatcacaaaactcaaagaaaaaaatgaggtatgatctttaatcaagttctgaatgttatatgtgttctgttgctatagaagagatactgtgttagtaaaattgccatggacttagatttaagatggaaactctgagacatttaaaggctaagtcacttaatacatcccaaatataataagtgctattatcctatgaatgtcaactttctttcagacaagtcaatatacttggcatatacatatctaatttgtacccacaaaagaaataaggggccatgaattatcaccctaatttataagcagataaataaaaccttattcattcacacccaagtcatttttgaacacctactatgtgacaggtactactgtagtcattggggatacaatagtaaacaaaacacaccaagatccctgcccttggtagattttaactttctagtgggagaagacagacaaacaacactacacataataaacttataaatagtgtaatatatgagaagagattaaatgctataggaaagaaagtagagcaggctaagtggaatgggtataccaggcagtaaggagggggtgatggggaattgcagattacatttaataatgcaaagagggtgggcaaggtgagcctcattaagaaaacgagatttgaggacagttacagaaaccaatcaactttctcaatatcttcataataagaaatccaagaaagacagaatttgatttcatttccatactagtagtcttttctaaggatttagcttgcagaatacttattctgtattttgcattataaaaatacaattgtaatattcctgagggctgatatccgaggtaccgctttcattttaggacaacttactgggattatttacagtctaattttaatcagcatttcagtgtttgttttcttgtcaaaaatattgtaccagrgcttcaccatgacagtaagaatttaagaaaactaagcattcctttataagcctttggtgattataatccttgagtacagcataatcctgctgctaatggacatcatctaggctcacaaaacagcaatttatatgtgttttaaagtttgtgattttcttatatttttgctacaatagataaaactttttttcctgaactatattctggaaaaatagcatatttttggccagtagataaggttatatactcaattcactacatggcttactaactaaacacactatattctggaaaaatagcatatttttggccagtagataaggttatatactcaattcactacatggcttactaactaaacacacttctatgaatctgatattaaagcctgaggtggcattataaaaataacccctaatattctcagctgtttcccacacagtgtcaatctatcaacatattaagccactgacaattccttcacagttgtttaatatgcatgacatttttatgatagaaaagatttttcaagtttaagaggtgtattctctgtatgtgtacatttgtgcattcctacatagaacttatgtaatacagcagactagataacctgaaaaacctctcactacaaaaccagttacactgtgcagaatatgaaacagcatgcaaagaagagctttgaaaaaaagtaaaggaaatcccagtgcttaataaaaagagactaaaaggcataaaaccagaaaattaaacatattgtaatggtaatacaagaactggagacaaagcctgatcttgcaggagccaggtgttggaactgagaccttacataaagtgagcaccttcaaaggtaacacctccagtaaaaaagtgaacaacggccgggcgcggtggctcacgcctgtaatcccagcactttgggaggccgaggcgggcggatcacgaggtcaggagatcgagaccatcctggctaacacggtgaaaccccgtctctactaaaaatacaaaaaattagccgggcgtggtggcgggcgcctgtagtcccagctactcgggaggctgaggcaggagaatggcgtgaacccgggaggcggagcttgcagtgagccgagatcgcgccactgcactccagcctgggcgacagagcgagactccgtctcaaaaaaaaaaaaaaaaaaaaaaaaagtgaacaacaaaaataaatctgcctactaatataggatgatgctaagaaattcgcctaagtctggccttcttatggtataaacgaaaaggctctcttgagtatttaaagctgagaaatcacagaattcaaaaatcaagaaacaccaagtgaagtcattaacataaaaagtaatactaggttggtaacgccctatgatactttacagaaacgaaggcaaaaactttctgatgcacatactctcagcatatacctcacagatttccatagaaaagcccagccagggcaaagcaagagagccgactagagaagccgaatgctcatacttcccaccaaaaaaaagagccaaaacaacaaataagaaagtatgtttgaactggagtgtttgagggagcrcactggaatacagtaggagagagacagaaatcctgtgagacaaggagacctttagtgagggtcacatagagaagagaatgaagcactctgcctctgccacaccgccatctccccagccagkattagctcagaacaaggagatgcatccccagtggggactaggcaagcaagaggccccagcagcccccattaatgtcacagacatctgcactctttgttgctgagaatcctgcagtttctacagaccctgagtccagtttagggagctgcctgacagccacatggctgcaatgccccagagaaggagcccacattgtatcccctcatccctgtgattcaagctgcagctatatgatgccattttgaaaccagagccacaactagagtacatcctgttccaggggccagtagccaccatctcttttcattcctaaggctacactgccattacactaccttcacacacagtagtacaccattcccttgctgagttgctacagctccctaccccctgggaacaagctcctaggaggtgttccacctttcacatcctagtgactgcagcaccctgaaccctgtctctcagagcctagatccagtgccccatccatgaagcccatatagcaccttgccctcaaaggaacagacaatcttgatcagcagagaaaccaagtccaaactggcctcatgmgcagtcagcatgctcaccagcgaatgcaccattccaaagcgagtcccacccaaaccagtggaccagcccctgcatgtccctggtgcactcaacagttgggtgcactacttctaaggatgccccaacctgagctggcagacctrtccgcatataccaccagtaagctcaccagctgggcatgtcattttcaggggacttctgctctgagttggcaagccaagccccatgcttgccagccaagtacactgcccccagagaatccctaacccaagctggcagactggctgctgcatgctcaccagccatgtatgcatctcacagcgggtccccaccttaaccagtggatttgttcttgtgctcaccagccaagtgtgctgtttccaggggtgacctgtcctgagccagcaaactagccacaccaaggccttcagaggttatcaataaagttgactacagcttaaaaacctgcagagactacactactgcacacacatagagcaaaagccaatgtaccctacccaaccaataccctcagacacatctgctggtgaaagtcattcccttcaaaagtcactccataaaattaaaagagttgaccattccatcagatgcacaaatatcaatacagggatacaagatacatgaaaaagcaaagaaacatgacaccatcaargaagcagaagaatcctccagtaactgacccctaaagaaatggaaatttataaattgcctgaaaaggaatttaaaataatgacctgaaggaaattatgaattgtggatgggggaagggaaagtctagaatatttgtatgtgaccaaagttaagttgttatcagcttaaaatattctaagttctttttacataagccccagaataaccacaaagaaaaaaattacagcagatacacaaatcaaaaagagaaatgaatcaaagcttatcactatggaaaaccaccaagtcacaaagggaaacaataaaagtagaagaaagaaacaaagtatctagaaaacagttaacaaaatggcaggagkaagttcttacctgtcagtaataatcttgaatggaaatagattaaattttccaattaaaagatatagagtggccaaatgggggaaagaaaaaaacgcaagactcacctatatgacgtctataagaaactcacttcacatgtaaagacatatagactgaaagtgaagggatgaaaaattgatatcacwtgcaaatggaaactaaaagagaccaggagtagcttcacttataccagataaaatagacttcaaatcaaaaatcacaaaaaagcacaaagaagatcattatataatgatacatgggttaattcaacaaaaaaaaaattgtaaatatgtatgcacctaacactagagtacccaaatataaagagcaattatttattagattaaagaaagagatagactgctatatagtaataatcatgaacttcaacttcaacaccccactctcagcaatggacagatcatccagacagaaaataaacaaacattggatttaaaccacacaatagaccaattggacctaacagatatttacagaatatttcacccaacaactgcagaatacacgtttttcttaacagcacaagacaagccttaacaaattttaaaagatcaaaatcattttaaatatgttttctgaccacaatgttataaaactagaaatcaacaacaggaagaaattcagaaactttacaaatattgtttaatgaaaattaaacaatatgctcctaaacaaccaatggatcaatgaagacattaaaagggacacttaaaaattccttgagacaaatagaaagacagcatatcaaagtctttggaatacagaaaaagctgttctaaaagagaagtttatatcaataaatgcttacatttgttgaaatgtaagtgaaagatgataacttaatgacacacctcaaggaactagaaaaacaagaacaggctgggcagcgtggcttacgcttgtaatcccagcactttgggaggccgaggcaggcagatcacttgaggtcaggagttcgagaccagcctggccaacatggtgaaaccctgtctctactaaaaatacaaaaattaactgggcctggtggtacacacctgtaatctcaggtactcgggaggctgaggcaaaagaatcaattgaactaaggagacagaggttgcagtgagctgagatcatgccactgcactccatcttgggcagttgggagacagagagagagactccatctcaaaaaataaaaaaggacaagaacaaattaaacccaaaattagtagaaggaagtaaataagaaagatcaaagcagaaataaatgaaatacagacagaaaaatacaaaacatcaataaaaagaaaagatcatgtttgaaaacataaaactgacaaaactttagatgccacagaaatgcaaagaattataaaagactatggtgaacaatactacacgaacaaattggataatctaaaaaaaaatgaataaattcctggacacatgcaaccttccaagattgaacaatgaagaaatagaaaatctgaaaacgctaatgagtgaggaaattaaatcagtaacagaacctatcctggccgggtgctgtggctcacgcctgtaaccccagcactttggcaggccgaggcagccagatcacctgaggttgggagttccacaccagcccagccaacatggtgaaaccctgtctctactaaaaatacaaaaattagctgggcttggtggtgcgtgcctataatcccagctacctgggaagctgaggcaggagaatcacttgaacccgggactgggaggttgcagtgagccaagatcatgccactgtactccagcctgggtgacagagtgcaactccatctcaaaaaaaaaagtatcccattgaagacaaaacccaggacctgatggcttcaccaatgaattctaccaaacatttaaagaataccaattctcctcaaactattcaagaaaattaaagaggagagaacatatccaaactcattctacaaggccagcattaccctagcacccaaaccagacaaggactcaaccaaaaaagaaactacaggtcactctgatatacatgcaaaaatgctcataaaatattagtaaaccattagtaaaaatcaatagcacattaaaaacatcatccgctatgatcaagggaattcatcccagggatgcaagaatggttcagtttacacaaactaataaatatgatacatcacgttaacagaatgaaggataaaatccatatcatcatttcaatagacgaagaaaaataatttgacaaaattcatcccttcatgataagaactgtcaacaaattagatacagaaagtatgtacctcaacactaaaaagtccatatatgacaagcccacaacaaacatcatattgaatgtggaaaagttgaaagcttttctcctaagatctgggataaggatatccactttcaccacttctattcaacatagtactgggggtcctagccagagtaatcaggcaagagaaagaaataaaaggcaaaatcggaaaggaaggcgtcaaactatccctgcttgcagatcatatgatcatatatatggaaaaccctaaagactgcaccaaaacttgttagaactaatagacaaatttagtaaagttcaaggatacagatttaacattcaaaaatcagtagcatttgtatatgctaatggtgagctagctaaaaacraaatcaagaaaacaattccatttacaattgctaccaataaatagagatacctaaaaataaatctaaccaaagaggtgaaatatcttttatactgaaaactataaatcattgatgaaggaaattgtagagaacacaaataaacagaaatatatcctgtgttcatggagtggaataattaatattgttaaaatgtccatactaygctaaacaatcaatagattcaatgcattccctatcaaaataccaataacattcttcatggaaaaaaatttttaatcctaaaatttgtatgaagcgacaaaagatcttgactagccaaatcattcttgagacaaaaaaaaaaaaaaagctggaggcatcatactacctgacttcaaaatataccccaaagttacagtatcgaaagcaacatgatattggcaaaaaaaacaaatacatagaccaatggaatggaatatggaacatagagcccagaaataagaaaggattttgaatattctcactacaaacaacaaataataaatgtttgcagtgatggatatactgattgcctttatttgatcattaacccatatatacatgcactgaagtatcacattaatatgaatatgtacaattctgtgtcaattaaaataaaattaaaaaactctcagcaaacataagcctacaatcaaaattatgaggcatacaagcaaccaataaaaaccatgagaaaaaatcagaagcagcaacaattaaatagattcacataaattaaaataactgaaataataaatgtaggctactcttttaaataattaagcacaaaaagcataaaaaatttgacacaggaacaagttactatccaaaaaggctatgaagatttaaaacaacaaatactagaaataaacattataaagacattaaagtttaaaaaaatcttattagataggtttagcatcaaacaagacacagctaaatgaataactaatggattcaaatataaagctaaggaaaatacctagaagatcaaaatgacaaaaaaataaaaaagagtgtctaagagacatagaggatagtatttgatatccaatataccataacaggtgttttagaaggagaaagaagaggatatgagaaaagaagtaatatttgaagaaataatagatagggatttkccaaaactgatggaagacttgagttcaaaaatctaaaaagcacaataaatcctaggctgaataggtaaatgtaaatcacagctagacacatctctggaactgaaaaagcaccaaagaaagtaattactcccaccagagtaactaaccaaaaaaaaaaaggcttttctatagcaaaactagaagccaaaaatcagtagaatattacctacaaagaactgaaakaaaatacttgactacccagaactttatacccaacaaatctatcctacagggccaggtgtgaaagacattttcaaactaacaaaaatggtaagaattcaccaccaaaaaaaatcttaccaaaacaactacaagggaggataaaacagaatgaagaagaattcaatccagaaaaaaagtactcaaatacaagaaataatagtgagcaaagaaagtaaaatatgaaggtgaaactaaaatactggataatgatagtatttaaaatttgagaagatgaggaaagttaaaatatttctgtgttattcacgaaaagagaaatataagccaaggttagacttttaggtaaatatgcatgttcaaattttaagattagccactaaaaggatggaattagaatgtataatttccaatctggtagaagagagaaaagacagaatttcgaaaataaaccaaaataaaagggaaaacaaaaggtaatatagaaaaatcaggataaacttttacctaattgggagatagaaaaaaatccaaatcatactaaatataaacaaataacttgcaaattaaatatcagagattaccaaactgataaaataaataaattcagttaaatgctgcctacaagaggacacagaaatgttaaaatggaaaggatggaaaaaaatacaccaaactaatactaatcaaaagtcaagtyagataaaactgactctcaaaagaataattctcaaaagaatattctcaaaagaataattactagagaggttaccagagataaagaatgtcagatgaaaatgaatttcaaatcaaaacaatcattatcagagagcttactagagataaggaatgtcaatctataacactaaaatgtgaaattcacaagtaagattctaaatatataaatgcataatatacataacctccccccaaatatctgaagcattaatgggcagaattaaagaaggaattgataaatcaccatcacactgggagaaaacccaataaaaatcagatattagtatttattaagcagacaaaaaataaaaatatagaaaaagtttatacataacctttattcaaattagcaagcttagtttaagaaagatatatagaaccttccaatcaataatctcataatataaattttcaaagcatgagattttgtgaaaagtgaccaactacgactatatagcaagtcttggcaaatttccaggaataactgtacatatatgcttcgattacagtgcattaagttagaaataaaaagcagaaagataagattaaaaaatacactttgatgcttaaaaaaagttttaacacacacacarttcatggatgaaaatgaatttataatataactgtaaattacctgcaattcagggatgatgcaaatactacacatcaaatcttgtgagatgctgctaaaaatgctcatagaaggaagtttataggcatgaatatgatattataaaagaatttgtgatctaagcaacagacttaagttagtaaaagaactataaaatgaacaggagagaaaaaaggaaggaataatgaagaataaatgttaaacataaaacaaagataaaaggattgatgaggccaggcatggtggctcatttctgtaatcccagcactttgggaggctgagtcaggaagattgcttgaggccaggagtttgagaccagcctagacaatgtaatgagacttatatctcaacaaaaaatttaaaaattagccaggggtggtggtgcgcacctgttgtcttagctactcagaaggctgaggcaaaaggatccctggagcccagaagattgaggttgtggtgagttatgattgggctactctgcacttcagcctggccaacaaaatgagaccctgccttaaaaaaaatttttaaaaaggattgatgtaaacaaaagtcaattttttgaagtctaataaaataggcaaaactagcagaattaaaggaaatgcaaaaaaaaccattaaaaatgactataattaaagcagagatttaaataaaagaggacactatgaacaacttcatgcaatatttagcaccatttcgtagatctgagcaaaatgccttacccctgcccactttggtttgaattttctgagtaaattgtcataaaataaatattatttcaaagtgcattcatgcccttaaatatttcttattatttctatttcttcttctattacaaataaaatcttataaaatcaacatagcaccataatttatgaaactatttgtaaatataagtatgtaaatgttttaaaacaaataatattttccccagaaaaattacttacttattacatgcaatttagtgttgcatatgtactaaggattaacacttggcaaatgatatgtgaaacaatatctcacaaggattacagaatacattgtaataactgtgtaagatacattacggtgtttgttcttttgagcatttcaatctttgaatcttgtaatgtatgtttatctgtgttcactcttatagaaaaagtcaggaatgtgcctttagtgctttacctcattcttgaatcagggttttagcaggacagaaactaagattgctggttaggcagaagacatttcctagagggtgtgtaatatgtgacatattttaaagaaatccaatagggatgatgtgagcaattattaatatgccaaagccccagcagacggttgctctcatcctccttctccaagaccaaggatgtcattgtaccagaactgctgtataagtcaaatatatatttctttctttctttttttttttttttttgctttggcccgacgtatttattgaagagagctctatccttctcccttctacctagaagaggaggcttacagggctggcacctgcccacacctggcattcgacatttccctgggctaagctgagtgggagcagatgcccccatcctatgaccagggcctgtgcaggagccatcacaccaccttgctgatgatgacacctagttcttcaatttcacactggacttcatctcccttcttgagaaagacagaaggtttcctgaatacaccaacacctggggaggtcccagtcaggatgacatcccctgggtaaaaggtgacaaactgggagacccacgctatccgctcctctgtcttgaccaccatctggttggtgttgttgctctggaccacttccccattcacttggcagcaggtctttaagatgtgtgcatctgctacactgtccttggtcaccaaggcaaggcccagagggtagaaggtgttgaaggtttttcccagcagccactgtttcccatcatgtctcatttgccagtcatgagcactcacgttatgagccgcagtgaagccagccacatgggccatggcatctgtggccttgatgtgcttgcctttctttccaatgaccacagctgctccacttcccagtctacctcctggctctctgatgggaggaccatctcatcatagggctccacaatggagttggcaaacttgctgaagttgatcggttccgtgggcacgggcacattctgttctttgcagtggtccacataattcatgcccacacacaccaccttatctggccatgtggctggagccagggaggtcacttccaaccatggtaggactggcaactgggcacccarggctcttcttgccactgagaggatggcctctccctgctctaggaactgtgtcatcattttggggagcatagagtcaaaggcattgaggttgataacccttccaccattctccatctctgggcccaagtgaggccccaccaggtggggtgcctggaactggactagtctcatgtctctggagggttgaaagggccacttctgagcctgcagcagagctgtgagcaaccttcttctaccagagaccagcatcagagcctggcggcggtggctggtcctcctgcgctgggttagtgcttgtggggccagaggtcaaggacagcaggtgcctgagcactggcaccaatgactgcagctagccggggaactgcatgcagcagcctcaaatatgtatttcagagtgacacagagttggtttacctatgatgctcagagctctccattcagtatctgcaagggaataaagcgtatcttgttctttctttctcaagtgcagtaattgtcctcagagataacctgttgttaccattctcagatttcagtctttacaggagagccaaatggatctgtggaaagctagaattttttttaacaattcctacaccaatgggtggttgaagttttaatttttttctttgaccacataattcagaaattggagaaatgatttttgtttgcgtgttacaatttttagcctcctgtcttttttaatgtctgagatataccttctggggatatcaaagtcaaacatttatgttatatgtcttttatgtgtaatctgctttgtgctttttttccctacagccagtcataatcccaaatattacaataaaaattttgttattttttattattcattactctttaaaataaaaatttctgtctagactctccaaagacgtaaatataatacaatacaggaaacgctgatgttttacagatcaaaatgatactgagaagtctggcacaaaagaaatacacagtagacttcacactaccaggaaaattctgtttaccaaaaatgtgccaactttcaattgtgttaagcgtcattgtttggaaaagacaaaaatcatttcctccaaaaaacatatggagatggagttatctttagaaattcccaggctttatagtttcatgcaactttctactttctagcaaataaataaatgaataattgccatctcttatttaataactccaatattctcatgacctcaatgtttataaaatgaaaataaattaaaaatgaaaatatacatagctgaaaaaacagttaagttgcaattaaagagattttattgctggtaagtttgagttccttcatttagataaatctcaagagaaagggaattcctcttcagagaaggaaacattgaaatgacagtgttcaaattccactgctagagaagacatagtggcttaaacctataaagctggaactgcaagagcaatccaaaatggcaagtagtttttgcacacttccagcgaaacaaagcccccatactacttctggaagttacttactgcatttctctcccctttcagaaaagaagggaagtaggtatacatgttgaccatattacatacacagtggaagatgttttctagccactaccatttattgatcatatgtgctaagcacaatttgaacacacataaattcagtttattttcctctaactctacaaagtaggttttactattcctatattataaatgagaaaaccaaagctcagagagaatgagagcctcaaagttagtgagttgatggagtccaaatttcaatccaggcttgtttaattccaaagcccaggcacttaatcattgccccaacattataaggagccaaataaagaattaagacattagaaggcaagcaacccacttttggtcccaaagagcaataagaccctgaacctatctttcatgaagtgaaggaattactggataatttggcctaacacactgctctcagtttaacacagctgtactctttctctacatttacatgcatctttcatctgagttaaactacttgacttaagtactctaagccccattttgcccattgacttattcagtactttgcaaacggttcaatctcaaaaagccacataaggagccatatattaactttttccttctttcattctcttcccttttctatctgctaaaattatagaaaatattcattttaattacacatgtttggccagaaagctcatatgatacctatgggtctgaaaagtgagtaggtgcccaagggggagacatttaaaagatgttccattrtaatcccagcacttcagaaaaccaaggtgaaaggatcacttgwggccaggaattcgagaccagcctgggcaacataaggataccttgtctctacaaatgamatttttttttaattagccattgccatgataggaataaataaacaagccaggcatggtggtgtacaaatgtagccccagctacttgaaaggcagagaccagaggatcgcttgagcccaggagtttgaggatgcrgtaagctatgatcgtgccactgcactccagcctggctgacagtgtgcaagcttgtgtgtgtgtgtgtgtgtgtgtgtgtgtataacatatatatatatggcttgtgtgtatatatatagcttatatatatatatagctcgtatatatatacacacacacacatagcttgtgtgtatatatatatatataaatagcatatatatataaaatagctttggaagatatatttaagtgttccagcagtagaaaccacagtgcttagtttctcatcgaatgggagtaagtgagagcttgacttcaggacttctggtttgggaggttgagtggatgtgatatcagtttcatctttaacctgttaagtttgataaatgttggagacttctggctggtaaagtcttttaagtctattaagcagttagaaataagggtactctggagaaatgcacaggtgagagagatcagatgtcatgagaaggtacagcattggtgtaaagacaataaaagagggtattgtattatgatgtatwttctgcttttaacattatgagtattctccatgtcattaataattcatcaaaatgttaaattactagaatttcattgtgtggatgtgctaaaatgtaatcatttccttattgataggtacttaaattgtttccaatttattgtccacaaaaaccttaagacctcattaagtcaaattgcagctaccatatatgtctttgattaattaaatacattccaagaaagtttttttggaaatataaatattgactaagcaactgagcacagcccatgtttgcctttacaaaagagtttctttatttaaatttttatttttaattttgtgggtatgtagtaagtatacaytaatggagtacattgccttaaatttcattataaaatcagatgtgcattcattcagatagaaagattggctactcaatagatatgtaaattttactttaaaataaagtggactttattaaactatatgtttgaggagaaaataaattattctggtaagatactaataagaaaatgttaagtgtgccatgttaaattctaaatgcataaaatgaaaatatatcttctctatcatttataattagcttaaaaagtagagtaaaaggtaatctagaaggttcaacaaatatacatggaaagctcagaaattggactgttggatcttctgaagaacaactgtttatggagcactaacagtgtgcttgaaaattaatctttatagtaaacatatttgtaaaccccattacaaatgagaacactgaggcacaggaaggcaacttgcccaaagccaaacagctgactcccaagctgctgctgctcctcctcctcctcctcttcctcctcttcttcatccttatcctcctcctcctcttccttatcctcctctcctcctcttccttctcttcctcctcctcaccattacactatgctgctgcctggaatccacttatggtgggaaaggatagtctacagtgcaagaagtgattgcatccagaaagtggtatgtatgattgcttacattcaaggttagaaatctwtaaccattctcttttggaagaggagatagacaagacattttgatcaggttttaaaaaaaacgttgaatctgtttattcaaactagtggacaattttgaaagtgtggactaggattatgagggagaagtcatcctcaatttgcagatcactgtggagtagactaaaggattcatgctttgaaaatgaatgaaaagaaacgagcaaaccaagtcccacaaccagagggtctatccaaacaaggtcagagaaggtattattgtgggagtccaacctagcaagcaagcagaagagagtccctttctggtattcagctttcctttggaggatcagaattagatattatgaatgctgtcgctggtcaactggattcatgagcataaattggagtcacaagataaattaggatctcatgcaggactttgcttatgaaacacgaatccattcaagatrgattcaacaggaagcaaagagaccaaagccaccacaagcatgaccaaggccacctagcctctgacttagggccatcatgttggtggagaggcaacctggccaccactgtccagcagtgacaggcagcctaatttcatttcatgggtaaccagggggttgatgggtatgctgaccaagcaattaagggtggctagaaattcagatgctgactgcgcccaaacaaaattactctcctgtccttccaggcatgcatatattccaaatctaactttgcaccttaatgtttaatccacagtgttatgttyaaactgcattagcctgctttacttccaactatagttagaagccctcttgtttaacacagttaatcagccaggcacggtggctcatgcctgcaatcctagcactttgggaggccaaggcaggaggatcacgacgtcaggagatcgagactatcctggctaacacggtgaawctccgtctctactaaaaaatacaaaaaattagccaggcatggtggcgggcgcctgtagtcccagctactcgggaggctgaggcaggagaatggggtgaacctgggaggcggagcttgcagtgagccaagatcgtgccactgcactccagcctgagtgacagagcgagactccgtctcaaaaaaaaaaaaaaaaaaaaaaaaaaaaaaacagaaaaacacacagttaatcaaaaatggtcaatgtgagaatcataaaaaaagtattttattttaaaacatgtacatttgttcatattcaaatgtgtttgtttattatggggttcagtcttatgagtgttggtctgaagatggagttctagatcatatagtttatgtcaatcacattgtttatatattatcaaaattttccattttagtttatttaaaatgaaagagaaaatagaaaagcctatgaaacaatataaatgcagttttctatttagattttttaacttagagacaaatttctgtcattgtctcacctgtccctgatttgactgtagttttctttactggtttacttttttcaccagtgaaaaacttacgcaacttattcaattatctcataaagctcttttctcttttaaacctcatattttattgatttctgtaatatgtaattaaattactggacttcaataataagtacacctgccataaaggtgttttggtataaaaacaacttgaggaacacagagatcaaaagatggtaacagaagtactgagctcagtaggagagtgaaccaagactatgcaaggttgcatgtgcctcaacatatttgacagagggaacaggtcattggtcaatgctgtggttaagtagcattggttaagagtcagtgtggaaatcaaagatggaaagtttcattcataaagtgatattttcttggaaaattctagccccccaaggcaattttcccctaccaaaacacctgagccttcatgtcctcatctgaaaaataatttaaataataataatacctgctacccaccctacctacttcaaaggattgtggaaggggctaaatgatatgatgttggtgaaggtacttaaatctctgagcctatgtcagtaatattccatcggagcaccaggaataaaagtagctatagtaataataattttagacaacctgacccattctatccctctcatgtattaatataacccaaatgaagctaagtatgaagattttatttacttagagccacattctatgtgatgatacagatctttagcttatagagcaatatctctgatatttaaatatatagaaactaaaaagaaaataacttaaaaataggtttttttttttcaggcaactaaacaactagctagaccgcctcctcacatagccctaacttggtgggggccagaaggagaatcaagggaagaaaaaagatcacaaaaatatgagctggcggccgggcgcagtggctcacgcctataatcccaggactttgggaggccaaggtgggcagatcacctgaggtcaggagttcaagaccagtctggccaacatggtgaaaccccgtctctactaaaaatacaaaaattagctgggcgtgatggtgcacacctgtaatctcagctacttgggaggctgaggcgggagaatcgcttgaacccgggaggtggaggttgcagtaagctgacattgtgccactgcactccaacctgagtgatagaatgagactccatcacaaaaaaaaaaaaaaaaaaaaaaaaaaaaaaaaaagaatttgcattgctttgtgttacatcctactttgctgtaaaccaccagttacaaagcactggttaatgtccagaatcttttcagtcagagtttgataataacttgtttgcacaagagacactgtcctctggaaacctatttttttcttccaaattatggattcttagaattaatagataattttactgaaaggataagcctagctagcaaargaatagtgatgatttggggttatattctgctaaatagcatgctattttgaatcacctacaattagtgtggtttcacagtattatctgtaaggcagcatttttcttccctgccttttctgcctcttttatctcattgttagcaccacaataaagaaaccctaaaaagctgtacaggaaaataatttgaacatgaacttgyactcttagaaacaactgcatttgcagctgtcccccacctcatattcaaaagtacccacacttatctggtctctttttctgtcatctaaatgagggaaaaatgtattcagtgtgtaaaaataagctattgtatctcagaaaggagatgggatgctaattaagggttgtttgaatgaacaagtcacattgcattgtctactgggagctgactgccaattgcttttttggtaacgagtcaaaaaaaacattcaagagggcccccggcaagcttgggagagaagcgagcagcatttccatttatcaagtaggtgcagaagcctgtgcaagtattaagagtcagggtgcaggcggcaagctcctgctttgcagcttttcttactggttttgagagccaccttcctaaagagggccctgctgctcaggtctgatcgtggacaatggggcacgtacgccagactgctggactactgaatgaatgcctctttctttgttcaataccttttccaagattctttgtcattcttcttggactcatcgggaggcatgggttttaagatacacagtagctcgggtcttacagcgaaataattgatgcttcattgaaagaaaccaggcaaattggtttgtatgattacctttaacaaagtgggaaaattttagacatttggcaactcatagatttcgagagaaatgagttgctctactttaaaaaggtttcttctcttaatgttaacattaagtcagccagagtaagtcttttggtctgatagcctgagagtctcaggtggcatgtaaataaagctgaaacaatttacttcatttagaaaaagggtcaaaatgtagaggatgtaaatgtgtttttattgtaatggatgaaagaaactgattctgctaggtgaagtgacttccttcgctgtgctagcttgtagagtagtggtacttagcataatagagccctggaggtgtgtttctgatactttgtgtcacttttccttcagttctataattttgtgagtcttttgctgctcttttaaatctataagtatttaaatttttatcaagtgtattcatatgcctttgacaaagatgtgaagaaacaagtgtcctgggtattaaaaggttctgattgaaggcaacaaatgaaagaatttctatgtaaatgtatgtatggttgggagaaaataagtgctatttaaacatttctaaaattaacattgcttccaagagcactcaaaataaaacataaacatttgtcattttacattctttatcatcaaaatttgtggtaaaaaatagttattttacagttgtttaaaaagcaaaatgagattatatgtatgcttgaatctcattttgcaatttttatttaataatgataactgactataataataccaaaataatatttaatgcatgaagatctaatcactttgggccaaaaacctatcacccagtagttttaaaataacaacagcaataataacatgttgtaagtgcttactctatgcctggctttatcctaagtactttccagatagccaataataaagaaactataaccaaagggtttaagtatcttgttcgtggattcacaggtaatgaatggtagaaccaaaatttggactcaggttccgagttcaaagcctgcgccttaaccaccatgctatgttgccttgcttgcagtataattattgtcactcttttaaagctcctcaggaggatccattataaaaatatttttaacgtaatttttgtaaattagttccataagtgaaaaaaactgttggtccgggaaaatataataccatagttgtattaatgatcattatatctgccttacatataaaggaaacttggttgtatgccacctaacatattagatattctcattagacataagtttgttgaagcaggaaaatgtaactttcctcaattattgtgggaaaacattcttttatttctagtcagcacatgataaattctaatatttggatctcaatttcttaactcttaaatttcttaacttcttaattagttcttaatttctctraggagttttgggtaattctgccttttttttttgtatggagccagcagtgacagtgtttaataggcacatatgaaactgatactttaaaaaaaactgttgagatataatttatatrccataaaatctagctgcttaagatttacaattcaatggttttagtatatttacaaaactataaaaattgatatttgatattttaaaactaatgatataaaactcttgagatgcttgaatgaaaagtactccatggctaataaaagccattaatatttgctgtattctctttcccttcctccagaaatgtgtgctatactggccggaaaagagagggatatatggaaaagttgaggttctggttatcagtgtaaatgaatgtgataactacaccattcgaaaccttgtcttaaaggtaagattatgtagctatagccatctacaaagtagatgatgttagaggattacatttctactttgaaattatttaagtactacaaatgcaatttaagcaaattaaataatgttaagatcaaagagaaactataatcattccctcatgtattttttgttgtcaactactattaatatgcagtataattaaatgaatgtaagtagacattaagaaaattcattatgtaggatgttgtgatcctctaatttgcgttaataaaatatctctgatttaaccttttgaaagcttttaactaaaggctgtgctggagactttaccatgattttttttaatgtcattttgatctaagcagctttgcgtaaggcctggaagctgtgaaagagaaaatctgcatttgtgggtggcagtgggaagcaaggcaagcctgaagtgttgatgagatcttcagaagcgtggagttacagtaatttatagggactttccccagacgagattatgtcataggaaaactatcttatttaactcatgggcagcagatgctgagaaatgttaccatggtattatttttgcttctggagaataatcacccaaaaatttcgatcttatctgcagcctcactgctgggatagaatcatcacaaagaggaagaaaacaggggcagagctacagtgatggcttttgttgggaagtttggaataggaaggcgtttaccaaaacctgtttttcaacacatgttctggagtgccggggaagtttggaataggaaggcatttaccaaaacttatttttcaacacatgttctggagtgcgaggttcatgccacaccctcacccgtgctgggtttggagatgaggtgtgtgggccctcacccaagtgtttccaatagagggatctcatgtagcttctttattgctgtgattcctcactcctattaaatactggagttttggatgagtgtagaagtattagcatgactgatatgaaattaagtgttctattgattaacatgtttataataacttgtcaggaatgctcatagagcaggaaacaaaatatatctcattctttcttggctacattttcacctaccatcttgtttattataataaattataaatatatatttagcatatgttacttatatgatctatattataactataggtagagatgtaaatctcaacaaaggtatgactttctcactttgcaaacaggttactgacagtaaagtcttctcaaagtaaaagggcactcttcaaaaatcttctaaatttttttcccacctagaaataaattgccagcaagatgggggtgataaaaggcattcaktattgtggtttggatgacttttagttctacaagtgaatgaggcatttggtggctgttgctattttcagcaaggaagccacacccaacatgtgaagcattactggtacacctcatggcctgatcacaagactccagacagtgcccagcccctcctacagctcatgctggatgtagaagaagacagacttgcttcccagggccgagggcctgtggttgtccactgcaggtaagacgtgtatggtcctttctgtctaagcaatggcccattctttgtaaagtcacagagcaggtgcaagtgggttttgcttcctggatgtgactttgttggcaaattaaatatttattgaaattggttaagtctgtaatatttgagtctgaatcaagattatgctgacagaagtgaagtcatgcttttaggtcatttttcacaaacaacaattacacagtcggcgaaatacaagttcgtaataaatggctcagtgaacaggagacctattcagcagttatctgctttgaaacttatattgattgatttagtctcatcagtcttgtacacaccaggaataaagatgcactttttgaaattatcagtggcttttttgttgtttcaacatgacatgtgaactctgcttggcttgtatcttggtaacattactatttcaagtttggtgaaaaccagtcaattattttaagagttatctccagaaaaacaggttgaaacaaatttatgaaatgagaagtgagcaagtcaccaaaggaaaacaaagtgctgttaccagaacrtggagcactagaggccaagccaacaacagcagcagggtctgtgctggttcctgtccctaatttctagttcaaagctctcttcctaaaactgatacctccttcccctaattttccttttaatgtaaccaaactgaaggcagcatttttaaagtaatttatatgaacaactatttatttatttatttatttatttatttatttatttattatgagacagagtctcactctatcacccaggctggagtgcagtggcgctatctcggctcactgcaacctccgcctccttggctcaagtgattcccctgcctcagcctccaaagtagctggaattacaggcatgcaccaccacgcctggctaatttttatatttttagtagaggcgggggtttcaccatgttggccaggctggtctcaaactcctgacttcaaacgtgatccacctgtcttggcctcccaaagtgctgggattacaagtgtgagctaccatgcccagccagccatttattcttcatgctttctcaaaataatttgggttgctttgtttaaccgcataggtctcttaagtcagcttttgatgatatatttaataaatatattattttagagtataattttagcctccttttttgagattgtgtggtttaattaagagtaaagtttactatgtgtctatttatccaaaggtagataatactggctttatcctaaacttaacttggagccaaaaaaacaaaaacaaaaaaacagcctaactgactatgcgttagggctggaactgtcccccacccaaagtcattaaacactcaggatatctaaaatgaactagtcacttcccctataaaaccagctccccttctgattactatttctgagaatgagactatcttttttccagtcactcaggatcccatgttgacagttatctctggtcctccttttaactccaacatcagtatctaatcagtcactagattggctttcccttcaaagcttctcccataatcaccatttcctgtccagccaccatagttcaggcccttctgacctcatccatgtattttagaagtagctggtaaaatgcacacacataccgcattcccccatgctctcaccgccaccatggcctacctgtgccctttctccgtcttaccttacatggagtctctgctcaaagcttgtcaatgggccaggtgcggtagctcacacctgcaatcctagcactttgggaggccgaggcaggcagatcacttgaggtcaggagttcaagtccagcctggccaatatgatgaaacgccctctctactaaaaatacaaaaattagccaggcgtggtggaatgtgcctgtactcctagctacttgggaggcggaggcaggagaatcgcttgaaccgaggaggcagaggttgcagtgagtcaagatcccgccactgtatttcagcagcctgtgcgacagagaaagactctgtcttataaaaaaaaaaaaaaaaaaaaaaaaaaaaaaaactagagcaaaagtccctaacgttgaacctatccataaaccgcagaggtcagtgaactccttgaaattatttggacacatttgagtatgtaaacttatgtgaatttttctgaagagtggaagcttatagtcttcatcaaattcttacttaaaaaaaaaaaaaaggatgtatttcaaaccacttagccttccatataagatcccagggtacctctctatctttatttcccatagttccactaaaataactttctcttcaagayaagctgttctacttattgttgcaaatcatatttgctgtttctcattaattcttttcttctttcattgtatatcattgtcgtacctagaatattctctctcarttataacagccaaaatacctgccattcatggggcacagttccaatcctatttcttcaatgaaatgaactttctgtggacacttcagctaaaagagagccactcctctgaattcctctgcactcacattcaacagaaaacaagtgccaaatgtgagaaataggtgctatttgagtgccaagaggggagcaattatttccaaccatgggagctgaagaaaacctctaaaaattggaataatgctgaactgagccttttgaaataatcaatgttgtggttttaaaaggagggagggcatttctgaccaagaaaacattgttaacacagaaaaattggaaaaccaaaagcccaaacaattgacgtaagtgaaaatcatggcacaygggagggaagacagcaaaatacataaggcttgaaagttagtcacattcagattttgcaaggtcatgaataccatggtagggaggttagacattatgctatagttaatggagccatctataggttttgagtagggaatgatataattaagtccctatttcagaaagatgaacttagcagctgtgcgaatttgtcaaggaaaagacttgagacttggaaactataatgagatcactgctaatcatgaaaaaaggagatgttgaaaacgtgattacagtctatagaaaggaaagcatgaatcccacaggctcagcagagatggaaaatagaagaagtggtaacagattggatgtgggaggtgagaaagggagagatgtaaaagatggttccaagacttctaggctggaaaacttgtggcagactggtaatgccattgagggaaaagataattaattctgttttagatacattgaatttagatacattgaactgaagcaagtccaaaatagtaaggaggagatggaatgacaatctagagtttaggaaatttagggagtctagatgtagatttgaaagaatcttttacatagagactgttagtggttaaaactgcagacagagacagagagagcacgtgtgcttgtgaggttgattttatggacatatcgtctaaggcagttgaatgtataaacccaccaggacaracatcatttctgttcaattatcatgtctatacaaatctcttggaaatatgtgcctctagctgcaccctctcctaaaatgaatccaatcttcaattgctcaattattcactagacttmtgaacatcagtatgtccaaggcaaaactccccttccctgcctccttcaaattcaccctattccagsatgcacttggcctcagggcatcaccattcttctttctctccaggcctagtcatctttgactttttgcttttctccctcttcagctccagtccttcagattcacactgggaatgtgcctaaatcttccccctcctttctactgcctgtatcttgcctaagtgcagaccttaattattttttattttttctagaacaattataatgcctttttactgttcccccaactcaycacttccccccacccctctcatcctactacttayaattaaatgtaaaartatattttaagcacttagcacagggccaggtttataatactcaatatgtgaatactacttttaactgtggtttcagatttaaaagtacccttgtaaaagaatgtttcttatctttgtcattttcccscactttttaaatttcttttcttttcttttcagtgcaggaataggtagaacagggtgttttattgctacatccattggctgtcaacagctgaaagaagaaggagttgtggatgcactaagcattgtctgccagcttcgtatggataggtgagtgtcacagaggcttgccttcagagcactgttttcattcacagcctgatctcatcagcctgacttcatgcataaacatctcaggctccaaggtcctaaatctctgtagagatgcttgtaaaatgcttaagtatatgcattatattaaaaagcctttttttctctcttttttgagacaaggtcttgctctgtcatccaggctggagtgcagtggtgcaatctcagctcccagcagcctcaaactcctgggctcaagcaatcctcacacctcagcccccgcacgtagctaggactacaggtgtgcgccatgcctggctaatttttttagttttttgtagagatggggtcttgttacattactcaggttgttcttcaactcctgaccacaagtgaatctcccacttgggcttcccaaagcgctgagattacaggcatgagccaccatgcctggcctgaagttatttatttatttattatttttttgagacagggtctcactttgtcacccaagctggagtgcagtggtgtgattatggctcactacagcctagacttcctgggctcatgtggtcctcctacctcatccccccaagtagctgggactataggcgagcaccactacacatggctaatttttgtaatttttttttttgtagagacagggtcttactatgttgcccaggttggtctagaatgcctgggctcgagggatcctcctttcttggcctcccaaagtgctgggattacaggtgaaaggcactgcatctggctcccaaagttattttttaatccttttattaaattgtgacaaaatgcacatgacaaaatttatcatcctaaccatttgtaagtggacaatttattagggttaagtacattcacattgttgtacaaccaatctctggaattctgttcatgttgaaaaactcagtatccattaaaaaactccccattcctctctcagcccaactggtaactgccattctattttctgtctctgtcagtttaaatgctctaggcaccttttacgtaagtggagtcatacagtatttgtctgtttgtggctggcttatttcacttagcataatatcctcaaggttcatctatgttgtagcatgtgtcagaatttccttgctttttaaggctgaataatattccattttaggacacatattttgtttatccattcatcaattgatgaagacttcagttgcttccatattttgactattgtgaatactgctgctatgaacatgcgtatgcaaatatctgttcaagaccctgttttcaattcttttgagtatatacccaaaaagtgggattgatggatcatacggaattctatttttaattttttgagaaaaccatcatagtattttctgcagtggctgcactgttttacattcccaccaacaacacaggagggttccagtttctccacaacttcactgacattttattttctgctttgctttttttgatagtagccatccttatgagggtgagatggaagagtcatttttatagagatatggtttgatcacctttgttataatctccatttgttttgaaaacaagataaacaagaaacttctcttcttccttgctccacaactaagcctgcctgggtaaatggacgattgagttagtgatggagaaagtggacagatgctgcttcagagaaggcacaaaatgatgagcagcaggcgtctctgctcagtaattcagtgtactacagtggaacaagagttttgttggctaggtatggtggctctcgcctgtaatctcagcactttggcaggccaaaacaggaggatcccttgagttcaggagtttgtgaccagcctgagcaacaaagtgagaccctgtctctaaaaacaaacagcaaacaacaaatgtttactaatcacctcatatgcctaggcattggtctagatgctgcaaatacagcattaaacaagaattttctgctctcttagaatttatatgctagcagaaaaagataataaacaagcaaaataaaccaagataatttcagacagaaataaatgctgtgaagtaataaaacaaagagggacacaggcattgattcccttgagcttcagccctatgacctagagttttctaaaaagataaaattatacactaacctttctttttttcctggagacagagtctcgctctgttgcccaagctggagtgcagtggcgtgatcatggcccactgcagccttgacctcctgggagtacaagcgtgtgccacactcagctgagttttgtattttttgtagagctggggctttgccatgttgcccaggccagtctcgaactcctggactcaaacaatcctcacatcttggcctcccaaagtgccgggattgtaggtgtgagccaccgtgccaggccatataattacctttcgagatttttttttcaacaaatatgctttgagcactatgtgctatgtcctggcatttcaataaaaaagacaagaagattattctgaaaaatgagataatatatgtaaaacacttggaatagagtctggcacatagtaagccctcaataaatgtttgttatgttattatcatctttattattaaaattatctgtgaagtttctcttacctctaaaaaaataaacattcaaatttccctatccagattagtttttcccttcccatctgtaacattcttgtctcctttttagacagtagcctctaagtctttctaaccgtatcttccctstttgttttctactatgtttgtttctttctttattattttctctttctgttagcatgtaaactctagaagcagttcatcatggcgattaacattctgggctctggaaacagattgcctgcctgagtttacatcccagattccaccatttttttggttgtatggccttgggcaagttactacccttctccatgcctcagttttctcatttggaaaattggagtaatagtagtatatatttcctattmttattgtaaggatgaaaagatgatatgacctatgtgaaatgcctggtgtgtaataagcattcaatcaagtttccacagttgttatcactatacgtagcaaggaacctaacatgtgcctgtaaactggaaatagtaatgtataactcacaggacttcagccacatttaaatgacattaaacctgaaatgtatttagtagaacactcagcctacattgcttatcctctctttaccccccaatcctgcttccctcttaccacaccccacatgtaactgcttccaaaaatgttttcttttggtacataaaaaagatcagttccaattatcccttctcctcttataattgctgccttaatctcctgatattcctttgccttccatcctgtgtagtccacctcagctggaataggatcagttgcttcacttcaaattttagggcctgtcttcacacaggaaaggggccctaactctgagggggagaagcagcactcagtcagccagagctgctcccacattgactttcatctgtcctgatttgtgcttctgtagacaaggctgccacctgagaccccaaatcacccggggactccagttcataccttggagtcctgtgttcttgtttagtgccagaactccatgaatgccaaacacatgcatggatctaaagtgactccaaaccaagctggcctccagcaacacctgttctgatcctatttggaagaacgtgctgaaaaacaggcttggtttgctctttttcttggctcttgttatgttaccattaattcttgcctgctcaccctcccatctcccacctcccctgcccactttcatagcctgacctccaccttgggttccacttcccagtcacattcccctttcaggtctaacaaattgtcctctagttttgaatggaattacaaatgcatttttttaaaccacatcacaatgcctcctctatctgctccttccttcctaaagcaaatggtcagaaaccttagccttggccttccgtcaccaccaaggtcttcccagaggtcttgtcttttcacttctgataggatcttgaaaacacatccaacttctctgctgatctgaagcctataggcacccaacccccttgagtttgaatgactgccaatatatgcatcaaaatcattctgatttcttcatcaagaccctttctgcattctttctgagcagctgtttctgttgtttatgaaacagatcctctccttgaaccttcctttgaaaggtctttcctccagcctccttccttcacaggatcaacatatgttttccttttcttgtctcttccttctgttgtacactcttctagttgttatgaaaagcagaacagaaaacctatccctttcgtttcacctcatcttacttctttttctcccmcattattcttgcctcttgttccagtccttcagctttttcctatcatacctcattttaaaaattccaatgtgtggctaactgctgccattaaccatgtttttggctcatggcagtaaagggaaaactggtctcagccaatccaaatgtctaccgttatgcacttgcagcatatctttcttcatcacttgttcaaaccttgtccccaaattccgattttcctggctatccttaccttcagctctgaatctgtccagagattccagaatgcactatgtatttaatacatacagaatgtatttaatcatggactcttcacyatggtcttcaaagcacatgacttatttaactcccaaaataaacccaagtgaaggaaaagaagcatcttggcctaatttttttttttttaatgaggaaccaaagaattcgagatagcgagtaacttgtccaaagtcaagtagcttgggaagtaacaaaatggacctattggaatctgggacatttgcctgatctctaattatttctctgatctttatcaatcttatagaaaagtaaataggcttttggaatatgtttattgtaaaacttcttgacaaaaacatatctctttgataatactctgccattttaaacaaatgagcccaggagttcgaggccacccaccctgggcaacatagcaaaactccacctcttaaaaacaaaatgcaatgacaacgggacaccataatttttaaaacagtttttagtataaatgagagctcctttatgaatagttggagtgacrttgtcggcaactgccttaagagtacaatttgagggacaaaacattgctgcttcttaaaatatctatctatggaggatgctaaaatgtatagcgaatgtctaaaatactgctagtaaagagctaatcttggatggattcttttaaaagaattatctttttctaaagtttattgaatctggagatgggagatggcataacacttcatatctactatgctattaacgcttcaatctaaacgaagtgatctgttcttttcagtgtggtagctggagagagtgtaactcctggcattaggaatacattcagaacttgggttttggtgaagggaaattgaagagggcttccgatgctggacacgccatggcgaggtccttcaatcaaggagactgttagataagctcatggcttgtcttgggaaagcaagcggcactaagacagagctgaagagcactccaagggacactgtgggcaggaccagctacataatttgtgaggcccagtataaaatgaaaatgtggcatctgttgattaaaaagtatcaaatacttcaagacagtgacagcaaagcattaacccaagttcagggtccttctcagcacaagaaggtgagaggtatatgactgcactggtcacgatcccttgaagctaactctgtcttaggatatttttagaatggaatgagtgtttgtattagtttggtgccaaagtaattggggtatttgctattataattatttttgcaccaacctaatagatgggcctgcatcctgtgttctgtggaacaggcatctgagacctctgcacagagtggtgctcctgaatcctgcatacattcatccattcaacaggcatcactagacatctgctactgagcatgaatcaggcacctgggtgtagaaaaatgggtgtcttaaccagctttcccagtttcccagattgtccttctcaggacatagtttaattaacaattatttactgagagcctcctaagccaaaccctcttggtggcgttcaggcacaaagtaggttcttgactaagttcggggaaaagctgtttatatatatatatatattttgttttgttttgtttgtttttttgagatggaatttctttcttgtcacccaggctggagtgcagtagcattatctgggcccactgcaacctccacctcctgggttcaagcgattatcctgcctcagcctcccgagttgctgggattactcccggctaatttttgtatttttagtagaggcaggatttcaccatgttggccaggctggtctcraactcctgacctcaggtgatccacctgcctcgggctgccaaagtgctgggactgcaggcatgagccatggcacccagccctacactatattycttcgaagtcttccccactcggagactcacaataagcattaatgcattaaaaaatctaaaatcttccaatgtagaaactcctttaattttatttaagcactctttcacatttatttgaccacagatgaatttcctcaagaaccatctaaatgagagggaaagaagttgtaataataaagataagctgttctttcaagaagctttgtggtgaagagaagactagagataggatagtaatttaagcctgaacctggacccctaaaaagaggaaaagggcccggcacggtgtctcaggcctgtagtcccagactttgggaggatgaggcaggcagatcacttgaggtcaggagttcaaaaccagcctggccaacatggtgaaaccccatctctactaataacacaaaaattagccaggcatggtggtgcacacctgtagtcccagctactcaggaggctgaggcaggagaattgctggaacccaggaggcagagttgtggtgagccgacttcacgccactgcactccaggctgggcgagagagtgagactcaaaaaaacaaaggtggtgggaaaggaatggtggaaccaactaattaaaagcagctaagtgtaataagagagagaaaagacagaaccagtatatcagaaggctgatattttgtattcggcagaatacgagcttcacaggccttcctctatccttttctactcttttttaacaacctccaaccactagcaatgaaggctgcatactgtgcatcttattcttataatctacccctctccacttgtagctgcctcctctgaggagtccaggtatggctaacagcaaagaaaaagacaaggcagtgatttggatacttgaaatggggctcatttcatgaccgatcagtcaagagcttgaacactggataggattaaaattttgatttccaccaccaccaccccaaaaattacaatgcctggtcattgtaatttaacatgaaaagaacaagcaatttctactcaagttaaaaatctgcattttagtaataaattcaaatggtctggttcagagacgaatgtgttatgctgaatggatatttccagtataacaatgacaaaaccatttggtagattcctcattctctggcaagacattatttttattggctttgtgacaacttctattaatagatgctcagttctcattgcagattcatgagtctgtgattctccttttactaatacttttgagcatattttgaactaaaataagatttcttttttttttccaagtaggagttcaaattcagtgcaaggcacccacgaatgttttatttagaagggcattaagggatcatcccttcattcccactgcattcgcttttaattaaaagatgaagtgggtggtatggcaattgcaactgaacactggtaagactagcaaaagaatgaggtgccggacatctctggactagatgtcaaggagcttggtgcgtggctctgccccctaattttctgtgtgaccatttgtccactctaggcctctctgtctacatagtaaaaggagatgtggggcgtaacagtgatctccaaccttttctggtataaaaaccagaaatatcttactatcaagagtaagatatttcatggacctccacctgattgttgtattttaatgcttgcaagttaatattcattgtgtgactcacaacaaagcttaagtggatgtcaggactcctctaacaagatgcttttccatgctggaattcagtgattgcagagtgaccaactggctttctgagatccctctcagctcttgctttctttgagtctttgaagatttgtttatgtggagaacaatgggatagccgcaatagtcataacatttgccaaacatctcctaggaaaagggtgggtttttttwwaaaatctagcctcaggaatatattgcccaaagttttcattctaaaggaagaatccaaaaccaaaaaaggggacatctccaaggccacatgaccaattttgaagtttttataaaacactctgaactgaactttcaattttgctcaaattagattgactaaattctggattttgggggttctgctgttgttttctgcagtgggaagcctaagtgggttacactcaagatgaagagagaggaagttcacattctaatcctgccttcagcaatgaccctgaactagttgctatataaaccaggaaaaattgtttatctctgattattttagtttagattacttattaatatctgaatatgataagtacaatgaactttctgttggccagcattgttgcaaaagggatattttgctcaatcacattttcctattaacaggagattaccrtaaatgtataggtcaattttttaaaattatagttgaaaaaaagatccataacattagtactaaactgaacacagtataatcattttttattacttagaaagcccttccatataatacttaaaccttctaatctcaaatatcactaaattgttcaactataccacctagttaaaaataccaattgctataaagctaagccaaccagcttcgctgcatgtagctcttgctaaaaaagattcatttaggcttgggtatgtcaaggttctacagtttgagatagtgacagaaggtcatttacacatttagcatgagagatgcagtgtctcagtttattactatagatgatgtttatattttaacatcagacagtgcttcacatgcatatagatattacagaagtatgactacaaatcaattcgtgactatcagaagacatctaagcaggcaggaaaggaacatattccattgcagattgacctcagataactttttcctcatcgttttccttttaatcccattggcaactggacactggaagaattttaaaacagaacctgggaagtgaaacatataaaataatatcttattccaaggccttttttttcctcttttttttcttcctgagtagcaggaaattatctgtcaaatccttctttttaagagtcaaggatggaatttgtagttgcctgtacatccttaccttagagggcttaaactggaatgacatccaaaggcctcacttgtggcttcccacacaggataaaaagatgcttccaatgtgcatcatatcattgtttaaatgttttgattagtcacttcagttcgatgattttcttttctttttttttttaactacagccatctcagaagaatatatatgccatcaatttccaaggctaatatatgtccccaacatattttttgtttccaaaacctggttgaaataatttcaaaactaaagtttctgcttgttggtctaaggtttatcaactgtaaccttacatttatccatatttctctgcattcccaaataatcacaaagattcctctaattaatgaacttcaaagatctcatttgaagatcaggaattcaacattttgatttgcttattttaaggacacttggagataaagccctaraaattggtgtggatttacttgacattataattcctgagatcayaacaagaggtctactttgtaaaacatattatgctgactgaatcttccaagtggctgccaggacattttccttcttcctagcttggagttaattaggtgttaacttgagtgttcagaggaaaacggctaattttcagaggaaaaaaaaatggaactcaaaatatgttagactcatcaattgaattatcatttgatatatgctgatttttatgacctacaaatactttaraacacatctattttggagaaggtgtctrtgttcaaaatacctggtcagaattggccaaatttacatttaagttctccctccttgatatgacatctgtgtaaagccatgggaaatcctctgtccaaggggccagacacaccttacagctgaccccggctaagcacagcagacagtagcctcacttgactcatgcccaagctcttggaactttacccaggaggcacattaacgtccacaccttttgttctaaatttactgtaccaaactttaccaaaagaattccagatttgaaaataataaaaagcaaaggagcataagtttcattgttagcccagaagtgagtcatcactgcagaatttcttctgtctactgattagaccggatacgggctgggcggtacgacaggaaaggctgttgctctctgtatgtgtgagtgaatagtcacaaaaggtcaaaattttaacatgttaaaagccaaatctctctcctgggcatctggagaggtttttttcaaaacaccctcccagtagcaaagggaaaaaactacatttttttttccctttctaacctgagtttacccccagctgacacagctacgtgctgttctgcacggagactgagacgacactgatctttgtatttggcagggctaatgtgatatgagattatctgacatttataggagggtagtatatctgaatcctctctggcctggccaaacacagcatttcatagtctgtgggcacaaagaaatccaagccacgtggctaacaccacttttgcaataaagggaatgactttcttccacagcatggaatggggcatcattaggatgaacaaataatttatcatccaaaccaaggtacttctgagagtgaaaggtgacccaattgataatgacaccaggacaacaccaatgaaccacaactcttccaaacatggttaccctaggtgtcgtattaactaagaataagaaaaataatacacrgcatttatttagtactcactgaagggcagttactgtgccaagagttttgtggattctctcatttaaaccttgtaaaacttgaagccttattagataaatacctaaataccttattagccaggccagtggttttcaaacttctttgtgaacaatggaaaactttttgcaggcagaatcttccacagaacaccaacacagaaaaccaataaaaaacacaacttccctggtcaaagctgggattggcatctagtcctaatgacccatcctcctcctctgccctgcccagggtcctcagccacctttgtagaaccctgggcttctggggattctgtgaatagccttcagccagacattgatatgctctgattcatttaatcctcacaacccgatgacgtttgtcatttatgccattttacaagtgagaaaagccaggttgggaaggactaaatgacttgtctaaaatcatttagctaagtaagttaaaaaaacaaggattcaaacctgaatctgtcagactccaagcctactattttcatcatctgcctccactgtgcctgtcttctaggctggtcaatatttagaaagatatttggaacttaatgggcaaactaatgtcctctgccagatttgctcttggttctccagggtctttgggggcctcactccagagcctcctaaccagtcctatttgaccagatggtaccaaagagtaacaataacaataacaataataatagttgacatttatggtattgatatgtgcttggctatgtgctraacatgttaagtgatagtcccatttatttctcacaacaatgctataaagtaggaactattgtttttattgtcgcatcatttgcagatgaaaaaactgagcactgcagagattgtgtagttgggtaaaatatctagtaagtggtggagacagaatttgtcttgacaacagtgtatgctgtctttttccctcttaacatactctggtcccccctggtaatgaacttggcaccattctctcagctagctggggttctcttgacatttttatttgaccttactcttttttggtaaactaactcctgcttagcagtaggtattttcacttaatgtattatacctcctgggaaaacaaacgtgtactggaaaagaaatatctgacgcacaataaaattttaaagagtttatttagtaagaagccagtcatacattgggaaacaccagaccaaaagaggtttagtgttccaatgacaaaacgccagaggcaagtatttattgggaaagtacagaaacaaacaatttatttggttggtttgcaattacataattgccttttttcaggtactgtattggaaagtccttactgacataacaatatgtgagttggatgcttatgattggctggggttatgttttagttctaacataagcatttatcagatatgaacctgaggtaagtttcacttctgtttgcaatttaaggtgcatgcatattggtgcacacctgtagtcccagctacttgggaggctaaggagatcagttgacctgggaggttgaggctgcagtgagccacgatccagccaggatgacacagtgagaccctgccccaaaaagaaaaagaaaaaaaaagtaagaaaaagagtacccttgtttctcacctcccagaaccactttgtattgggaactttatatcagtaatatagatccagattttagcaaatccatgaaacctatctgacytaagagcttcctggagtcaagtcagagctctcctgaggatgaataactatagagctctcttgagagttccatagttaaccaagctttatacatttattccataaatatattttgtatacagacactgtactagcttcttaggtgtttctttttttgctatgaccagcctatctaaaaaactgcatttgccaggcatggtggctcatgcctgtaatcccagcactttgggaggctgaggtggatggattgcctgagcctaggagttcaagaccagcttgggcaacatggcaaaaccctctctctctcttaaaaaacaaaacaaacaaaacaaacacaaaaaacacacacacacagaaaaaattagctcagtatggtggcatgcacctgtcatcccagctacttgggaggctgagrtgggagaatcacctgagcctgggaggccaaggctgcagtgagctgtgattgcatgactacactccagcctgggcaacaaagcaagaccccatatcaaaaataagaagaaagaagactctgttgacctttctaagaatggattacctgttatagagcaaatgctatcctctggcctcaacctcctgtgtagttgggaccacaggcatataccaccatgtccagctaatttttcttttaaattgtagacagggtctaactatgttacccaggctggtctcgagctcctgggctcaagtgatcctcccactttgggctcgagtgatccatccagcactcccaaagtgctggggttataggcatgagccactgcatccagccaatagactattctatatatcaatatatgcaataggacatttatttaatattttcagagatgattatgatgagttcctgaatttgaaccascctccagtgaatgcatcctggaataccttttgctttcttttagcctagagtttatctgttttcacatgacatgaaaatagcatgacctgggtaattcatttgacaagtatttacctaggactcgtaagtgctttttattgttacaagtagaagaagaccatgccattaygcttgtaggtctttaaaggacctacaacctagttggaaataattatagaatgggattagatagtatatatcatgatatcaacttactcatattaaagaccctactttgtctctttttctattttttaataatgccttagataaaaagatgtaagggatccttgttaaatacctgggagacacaacgctgggagtgagaaatggaagactaatatattgacgatagatagtgatccagtaaacaagagcattgtgctgaaactaacaagttgaaattaacaagaataaatagaaagccttgcatttagtttcaaaaatccagtagcataattacaggatgggagaaagctataatgtccacattcaaaaaaagtcttgttgactttttatttaatctacaccgtcagttagtatcttaaaatactaccgagmaccaggcaccatgtaggcactgggggacctcaccacctgatgcacctgcaaacacagatctattggtctctaacgtgcagctggargagaaaataagcctgcttcatagatctcatcagaaggagacacaactctctaagaaggtcatatttgataaaatagcctgtagaagagggagactagagtggtgagtgacagaaaaaccaggctgtacagaaatattgagtgaccacaggatgtttagtctaaagaagaaaagattataggactttgatggctgttttccagcctttggagagctgttgtgtgactacaggggagccttaagacgtcttttgggttatttcagttggaccaatgcggtgaaagttagaaaggacagattcatgttgatgtcttaaaagttttcctgccaaccttggaaaaggctgcctctaaaattgcaagatttctaaaaaagctatattgtcagtgactagaatggatgatctctaagaattcctctgatgccagtttttttcatttttattttccaaattaagtgggaggtaagagaacttttcatatactttcctgaagccttcagacctgcaagaattttgccagcccacaattaatgagtatgcttctccatcttccccactttcactggctaaaacaaccttgatttagtgaacagaatgtcatagtaaatatactccaaccattaaattacaccactgacccacttagggtgaaacagttattaaattctaaactgtgtctccattcattcaccagttggacatgtaaataccagtgctgaccagaacatacaagaaggggaaaatcttgcctcaaagtgaggtaaatggtgagaggaagctgacagaccagagcctaagaggtggagcacatagaagcttccacatactgtctgcagctcaagagggagtaatggtgccctgagctgtgcaaatgccagaggaagggaggcacctctcagctccctggagctaccctaatatttactgtggtggtgtctcccaagcttcacagttcaagccagcatcttcggaacacctgctatgattttagatgagcccagatgtcatcacacagctaagaagataaaccattaccacattctcagctggccatttctgttgttcacttctgaccaaggaatacttagcccagaaggttgccttcaatgcaacaaaatgtacagctctaggggaggaagaccaattaaatacttctgtcaataagttgctgtcaccaaaaactgtgaatttacctctttattttttgccaattacatcattttgacatcatgttaattttcctggggaatcactgtttagtttaaaacaaggaagttttactgctctaatattgacatagattgacaaataaacatagaagcccagtttttattattaccattaactagaagtcttgttacagtgagacaagatatcttgtttttaagttgaagtgcctaaataatctgaaagttattttgaatgatactaacaaccacttggaaaaatctggttaaaacatagagttaaactaaaagataagatcagttgcatgattgcagagttacagagaatttacaagactttaaatagttaccgatagtgatgcttttatacagtgagcaggaatagtaacatattaatgtctggtaactttgtcaagctaaaaaatcataattataggactggacaccgtcgttcaagcctgtgattccatcactttgggagcccaagacaagaggatcacttgagtccaggagaccagcctgggcaacatagtgaggccttgtctctacaagaaaaaaaaaatttraaaattgtccaggtgtggtggtgcctgtggtcccagctacaccagaggctgaggtgggagaattgcttgatcccaggaagttgaggctgcactgagctgtgatcatgccactgcacaacagcctaagcaattaaggagacgttttctcaaaaactaaaattaaaaaaggatcataattatgaagggggaaaatgtgatataggtattatgtatataaaaacataatgagaagcaccgttatttctcatgaaggcaagtgctttctatgaatccattgacaaggagggtgctgggcagctagtgatgataatggtgataaccaagaggaaaatgtcacagcagagccaattccctttttccaactcatttaaggacccacccactattgtgtttagacaccccgtacaccaaaaggctaaggttgcttctgtacaacatattcaaataaaccattccaaggtagacttcrttttacttgtagaaagcaacattttgcagatgagttttgtttggtttgtctccgtcaatcaattttaagccaaatgtataaaccattttaacaagagatgaatcatgaggcacctgagaagtaatacaaatataccagctacaatgaatttatttaaccttcacagcagtagttactgttactatcctgctttaacagaggaagaaactaaagtgcaaggggtttygaggaatttgtccaagatgcatacagctaagaattggcagaggagggatttgaactcaccttggctgatgccaaatccaagtacttgatcattaggctgtaccacctccccagtaatgttacacaggtaaaaattaatcacgtgcctagtgtgtgcygggaactgtgttaagccctttatatacattaccatgttaactttgatagttgagacatttggacacaggtaagagggataacaaaagaaccactaggtcractgttctatgtgtctttggcataataccctagcttggatgaaatctctgtgttacttgaaattgcaagattttagcaaaatcagttattttatgatttcttccttgcagaggtggaatggtgcaaaccagtgagmagtatgaatttgtgcaccatgctctgtgcctgtatgagagcagactttcagcagagactgtccagtgagtcattgaagacttgtcagaccatcaatctcttggggtgattaatcaaattacccacccaaggcttctagaaggagcttcctgcaatggaaggaaggagaagctctgaagcccatgtatggcatggattgtggaagactgggcaacatatttaagatttccagctccttgtgtatatgaatgcatttgtaagcatcccccaaattattctgaaggttttttgatgatggaggtatgataggtttatcacacagcctaaggcagattttgttttgtctgtactgactctatctgccacacagaatgtatgtatgtaatattcagtaataaatgtcatcaggtgatgactggatgagctgctgaagacattcgtattatgtgttagatgctttaatgtttgcaaaatctgycttgtgaatggactgtcagctgttaaactgttcctgttttgaagtgctattacctttctcagttaccagaatcttgctgctaaagttgcaagtgattgataatggatttttaacagagaagtctttgtttttgaaaaacaaaaatcaaaaacagtaactattttatatggaaatgtgtcttgataatattacctattaaatgtgtatttatagtccctcctatcaaacaattacagagcacaatgattgtcattgggtatatatgtatttactctctattattgggcataaaggtggcttctgctccagaactctatccactgtatttccacatcgtgagtcattttactttaaaagggaaaaacaaatttgtagcaactctgaagtatcaagagttttaactacttgwctctcttttgctaagaagggatttttgaatatgctatctacctggaatctctctctcaacaaaaggtatatgccttcaggaatgatataatctgtcccattttcgaggctccttataaggacatttccatgtatgtccttacatttctgaaagctttcaatcttcaagagacaaaaaaaattaaaataactaccctcagcaaacactagctgttctgctcatatatgaatttttaatgcagcaatgttgactttgtttcatactgccaataaactcttaatactaaatactgagtaaagcatattcttttttttttttctatttggaaagacgccatcctctgtttggggaagaccaaagtagataatgtgatgggtttaattttagtgtctgcatctccccagtgaagatgacgatctcaaaatgtaatattgtcatcacttgggagataatgatctagaagtgccatcattatgtggttttcctcaatagactcgcagcatatcattatacaaacagtacatgtttatgtctttatatcacttgtcatagaccctcatcaattacatggcttatgtttattcagcagaatcacatcacctgaagagatgtaatgtttcaggaacattcaattatctgagatttcaattcctttctttcttcttgaggttaagaagcagtcacatgccaaaggaaaggtaggtgaggtcttaacgagatttactctgctcttgaaggctggaatattttctacattaaaaaaaagaggtaatcataatcccttctttctaaggaaacagacaaaaggacactggtgtaaaacttccccaaacaattcaataggaggaagtgctcgtcactgacttttccccccaccatgaaggcacatttccttcctagtctttgcttctcttatctgggagaattttttttttccccaagcgaagcatgaacagttgctaagtggaaaatggaggctgaattttacatggtgattcttacctgcttgatcttcaggaactcaggtgagtgggtctgcctcagtgtcctgaggcatttcttcaagatctagccaaggagtccctggtctttgaagtgtctgaaataaggtagaaggggccaggtctccatggcagtttagccaaagacgatgaaaagcaggaataaaaggagccagctatgcccatactgttgagatttctctccaaaagaaaataaatgctctcctctcatcctccaaatgcttcaggcagcccctgaaatgatacatttagagcagagcgtaaagaaccccgaggaaaagtttgtattattatataacagtctgtggctttccccaagcctttttccgacccggttatagttttattttcttttgtgttgaagaaagaaaattgaaggaatatgattaaagggggtgaggaaatgtagtgtgttttatttggaagttgtcatttgggagggctgaacattttcatgagcgagctgggcaatttaagtaaaacctcattgaaaatggtttctgagccagagtatcttgctctttaatactgatgtttagcaatttgatgtttaattttcttacactggcacatgatgatttttagaaaatctattcgtatttgagagaaaactgtagatattgtcataaaatagagaaatgctcctctccacgactaaaggaaatttagtttgtgataatcaatactttcattggctgcaattagctaggaggttgtgcttggagaagtgggaaaatttgttttattttttgataaatgtatgcaattttaaaaaattgttattcaaactatgaaatttgtatataaatactgcaatgtgaatttaaagactggaaaagggggtgcttttttaaggtaagggaggaagcttatatcgaatatgtcaaatggttaaaaagggagctgagcatttcataacttcagcatatctaactaattgggctaaaatatactatatactttggatggttttgtttctttccaagcttcctttcattttccaataagaggtgtgcttttttcccctaaagcatgtgaaaattaaaaaaaaaaaaaagatggggagttaagtgtaacatattgacattttatatcgtcagctttggaattttaaatcacatgtgttaaatatgagaatgttcacttgaaatgatagaaataacaaaatataagtaaaactagtgattttatttagctcatttgtgggtgggttcttccgttttctaatgggcctcataatttgctacatagtgctttatgagcttttcatcttccagaagggtttcagattgtccatgtccagaaacaacagtgtcttttcaaaaatgagaaagtggtcgtgggctcatgcaacaggaccatccagaaccagcagtggatgtggactgagratgaaaagctccttcatgttaaatctgcactgtgcttggccatctccaactcttcccgcggcccctcccgctcagccatcttggaccgctgttcccaggcaccccgatggacctgctatgatcaggaaggcttccttgaggtggaaaatgcctctctctttctccagaaacaaggctccagagtagtggtcaagaaggccaggaaatacctccatagctggatgaaaatagatgtcaacaaggagggaaaactggtcaatgaaagcctctgtttacaaaaaggtgagctattcctttcagarcaaatcctgaaagtctttctactaaatatcttgggggttttgtttgtttgtttgtttgtttgttttacatttaagggaagtccacatgccccaacatatttcctatggaagattcataagctaatggaggtggatggtgacgtgcccaatgatggaaaacttcatgaccctcattaaaataagcccaactttttctattgctttttcttccttcccttcttgtcttgcttcttttattaattcaacaactatttcatgagcctctcttctctgccagttaagcactgttagatgtaggaatatggatgtaggcatatacacagcctatatatgtaatgactaaagtcagtaatcggaaaattattagattttattgacagacacttctatttgctaattataataaattattagaacatcagaatggtgcttgataagactggaagatagttgtgtttttgcaaatctcttgtattgctgtttaggggtagatatcttttggaggtaacacacttttgaaatgttaagaatcaatgggcagccacagatttttctaatttattgaccattaatggatataacccagataatggacacatgtagaaaatatgttatacacatgtgcaagctcctggtgcaggacacagttcagtcctgagctaggaatttttgcttgtggaatatataggcagtttaatcttctcttgaagttaatcatgcaattgtgtatttactcttctattagaggtttgctttagaaagtcatgaaagataaaactgatgaatcacaatatattaggcaccaatgaaccttacaaagcatgggaaaagttatcaagaaacgaagcgcctcactaagaagacaaatttttcagggttaagtaaattgtcccagataaattagcagcagatctatgattagagcctaagttttttgactctttgttcagtgtacattttactataccagaggttcccaaatgcttgaccacagacttgccccatggcttgcctaagaatcacctggggtagaaaagggagggcttactaaaaatacacattcccgtagctaatgcatcctgggcttaattcctaggtgatgggttgataggtgcaacaaagcaccacggcacacgtttacctatgtaacaaatctgcacaccctgcacatgtaccccaaaactaaaaataaaaatttaaaaaaaaatacacattcccaggattctttcccaccattttttcctctacaaccacctccaagattctgtttcaggaaatctggatttgtgcataatacttgatatttattaatcaccagaaaattttgatccataatccaatatggagatcagcatccactgtattgttaagtcttttccttaggtgttgatttgtgaggcttatattagtctttccaccatggtaatctttggacaattttttctcactcattcattctgtaagttaaaacaagcatttaactagatgccatttgaatgtgttatgcttttctacaataagtggtatgctttgctacaataaaagttgagagttatagtttctgttcttatatcatttctgcctatgagaaaaaaacctactcaaaaattcaactttatcagaaaatattcagcatatagcaccaatttgtacaatacctttcctgtggttcatctatcaaggcctctcctaaataatatagaaacattataactgttccatttttactgttttacacaagaagtgagattcatccccaaaccccaatcaaaccttatttaacataagattacttagttggaactttaaaaaaaagtagatatggactcagtggtgagttattcaagataaaagataattcatagaaaaactacctcctatgaccctcatacaaatatgtctagtaatagacttcgaaaataaggtaactagaataagccatttgcaattaaccactgaacaatgctatattcaaaaaatgcctgataatatgtgttggggaaagaaattaatttctagaaaaagcagaagttaaaatttgcacaattgtggtacaaaaacacccttatatttgagtacacataagtataacacatacttttgctttaacacaattataagctaacagatatatttttctgctccatcttaaatatgccattgtggggttttttctttttgtttttgttttttctttggtttttgtttttagaaacaaagtcttgctctgttgcccaggcaggagagccatggtgtgatcatagctcaatgtagcctccaactcctgggctcaagtgatcctcccacctcagcctcccaaagtactgggattacaggcatgaatcaccatgcccagccctgataaaagtttaagaataatacttgtagacctatatcatgagagctcactgacttgctagagtagctactgtgaaaaattaaccgaaatgcattcatatgtttgcaatgagtgatttcaaatcattgtttaagttggtaactaagtattataatctacagcagcacaaatacatgtgttgttcatctatgggatgtgaatttttttgtgtgttcttccatgaaagaaagcagacctatgaaggtaaaaatctaagccacatgtttcatatttgtttcataaaagacacattaatgattgtattcaagtttccaggtaatatttatttaacacctactatgtgccagagcttgtgctagcactcaggtaccctgtgctagtactaaggtgccctccacaagtgatttttgacccaagctgcatattagactcacatggcagcttttaactaatactagagtataaaacctgagctttatcctctaagctgactaaatgaggtattgtatttttaaagtacttcctaggtgattctgatgtgcagccaaggttgcaaatcattaaatacatcttattccttaaagtaatggggaaatcagataagtaaataaataggtaattacaatagaatgtagagagaagaaagtactttcctttccaatatatgtccttgccagtatgtcacattaagcactcattccttttttttttttaattatactttaagttctagggtgcatgtgcacaatgtgcaggtttgttacataggtatacgtgtgccatgttggtttgctgcactcatcaactcgtcatttacactaggcatttctcccagtgctatccttcccccagtcccccaccccccgacaggacccagtgtgtgatgtctcctgccctgtgtccaagtgttctcgttgttcaatttccacctatgagtggtacacgcggtgtttggttttctgtccttgtgatagtttgctgagaatgatggtttccagcttcatccatgtccctgcaaatgacatgaactcatcattttttatggctgcaatagtattccatggtgtatatgtgccacattttcttaatctagtctaccattgatggacatttgggttggttccaagtctttgctattgtgaatagtgccacaataaatatacacgtgcatgtgtctttatagtagcttgatttataatcctttgagta

SEQ ID NO: 95274 - DNA, 42969 bp, Homo sapiens
aaaataagctacttcctaatgtgcctttttgaagcgccatttccaaaaaaaatttttagtcatttcaaaatactctccaacacaaatagcttttaggtttctatacacttatcagctgcaacgaaaaaatgccagaaataacttaggttttttcatataacttgtcttgcaagctctaagccatatttacaacatactgagcagtaaaagctacagatattacatttgtaaatgttagtttctgtttaggacttgtgctttcttttgcctccaataaactttctttttaaacttgcctttgatacaaagtttttgttgcctgagcaatttttttttcacttaatatgtaagcatttctagacagcatcactgtgaaagttaattttatgtttcaacttgactgggccatggggtgcacagatatttggtcaaacattattctgggtgtgtctgtgagcatgtttctggaggagattgacatttgaataggtagactgagaaaagcagattgccctccctaatgtgggtgggcctcatccaatcagttgaaggcctgaacagaaagctgactatcccctgagaaagggaagattcctttgcctgactgcctttgatctggaacatcagcttttccctgcctttggactcaaattgaaatgtcagctctttcttgagccagcctacctggaactacaccatcagcaattctggttctcgggcctttagactcagaccggaatgacaccatcagctgccctggatctccagcttgctgactgcagatcttaggacttgtcagcctccataatcacttgagctaattccttaaaataaatctctctctcgctgtcactctacacacacacacacaaacacgttgattctttttctctggagaatcctaataccatcatttattctatttgtttttcaaaaatcctgttgaaatttcagtcctcttctttacatttaagtctatcatcatgcatcttttccctataccagtcataattcttcctttgatttctttcataatggctccttaaattgtattttttttaaaaaatcaggcacactttacatcttaaagaggtaggactactctttattttcacaatcaagcatgttcttatgcaaatttttgtaaatacaagcctacatctgtctcattttccaatttttaatagaaacatgagtgtaaaaaaatttcactttcatttacctgcacttcaaaagaaaactaatattgcaagcaggggcagattaccccagcacagaaagtggacaaatttttatgatatcaggtcagtaacaagagtttctgggggaaggtaagaagatgaggaaggaatcactgtgagctgtgagcagctccctggattggtgatgtcctatggagtgccactagagttctaggtttagcaattaacccctctggtctgctttatgagggcttctgggaaaggctgggcagatggttcactgcacaaacttccagatatgtgatgaatagggcaactgtaatatcagcctggagttaaggcatcttcttttagtctccccaagagctcctataagtgtcccaccatgtgggacacagaggatggttctgtttcagttgctggtgtatcacactagtgcaccatgtgcacagttcagtgaatttctggccaggtgattaaataatacatccaacagtgctacaattctgttgatatgggaacaaagtcaaacaagaggccatgagttcatttattcaatcagttacttttggctgagtaccacctactttgtgccagctctggatataccctcaacaccctagatctctgtctcatgtatgttcctcttccacttccatgtgtcaaaatttaattcaagcattactccctcaaggaaactgccattttttcccttcagatctcccaaacttccctctcaatctgggagataaatctctgctttgtgctcccaatacatctggctaaatcattttataatatggttttcttgcctggctccccctcggccttaagctgcaagaggacaggggttgggtggagcatttttcagttcactcaggaggggtgaatggaataaacttaggataaggccaaagactaatcaagcacacacccaagcccacacacagcccagaaaagagagctcttctgggaggatgagaagggctcaatgattgcgttggatgtgaaaaaccatcctctttttctaggcttcccgcagaagaagaaatgactcaagagccatcctatctgagcccaggacttctccttgatataatgggaataacaatatctctctcattggctattgtaaggatcaaatcagataactgatgtaaaatgcttatcataattatacagtactttttttttttttttgagacggagtttcactcttgttgcccaggctggagtgtaatggtgcaatctctgctcactgcaacctctgcctcccaggttcaagaaattctactgcctcagcctcccaagtagctaggatttttaagagacaggtctcattctgtcacccacaccagggtgcagtggtgcaatccatagctcattgtataataacatggaactcctgggctcaagggatcctcccacctcagcctccccagtaattcagactacaggtgtgtgccaccacttctggctaatttattttttgtagagacagggtctcactttgttgcccacgctagtcgtgaattggcttcaagtgattctcctgcctcagcctcccaaagtgctgggattacaggtgtgagccactgctaccagtcttaaacagtactattatcttccagtcagaaatttctatggtcttcttcaaggtgcagatacttgttgccacagccatcccttcaggccaacttctgacccctcttccctgttcatctcccctattctgtcttgtctttttcttctctccacttctctctcccctcttccacttctttcctttccttccttctcccttcctacttctcctttcctctactctccttctctcctctctggtctcccttctcttcttttctcttcttctcctcctccctcccaaacaactctagtctctgcttgctttgctcaggaagcagtacactaggcaagaactgaaacaaattgcctccatccacatgtagttctaccactaataatgccttagttttctcagatataaaaaatggatattgattttaaaaacaaaataacaaaaagtaaaaaacagtacttctgcaagtctagatctgaaaacagtaataaaacaaaaataaaaaacagcatttaacacacagctgctttgaaaataagatacatacataagtacttagcaaattcgctggccctcagtatagtgctaaatactgattgttatctattcctattctttcttacctcttctcttcctcttcacccaggcttagggtgcagagaagaaaagaagtttatatggtacagtccacagcaaaagttctgtgactttcaaagaagcccactttagtctcatactagcatcagataattaaacagtctcctagccacagcaattaggcaagaaaaagaaataaaagacatccaaattggaaaggaggaactcaaatcattactgtttgcagacaacatgatcttatacatggaaaaccctaaaggctcccccaaaaaaactccaccatttaaaactagcaagtaaattcagtgaagttgcaggatacaaaattgacatacaaaaaaacagtagcattctgtatgctaatagggaactatctaaaaagatcaagaaaacaattccatttacaatagctacaaaaaaagatacctaggaataaacttaaccaagaaggtgaaagatctgtacaataaaaaaaattaaggaaataaagatgacacaaataagtgaaaagatatcccatgttcatgaactgaaataatattgttgaagtagacatactatccagaacgatctacagattccatgcaatccctatgaaaataccaatgacattcctcacagaaatattttttaaaatcctgaagtttgtgtggaaccacgaaagtcctcaaacagcaagagcagtcctgagcaaaaagagcaaagctggagatatcacaaagcctgacttaaaaatatgctacaaagctatagtacccaaaacagcatggtactggcagaaaaacagacacatagaccaataatgtaacagaatagagagaccaaaaataaatgcatgcacctatagccaactgattggtattgagggagggattgagggaggaggatggggagaggttggtcaacaggtacaaagttagataggaggaataagttctgatgttgtattgcacacaaggtgactatggttaacagtaaggtattgtttatatatcacgaaacagctagaagagttttttttaatgttatcaccaaaaatgcatgaggtgatgaatatgctaattaccttgatttgttcattatacaacatatacatgtatcagaacatgaaattgtaccctataaatatgtataattacaatgtgtcaactaaaaatgaaaaaataattgaactatcaccttattcaccttcaccacacattggtcatatttctgaccaatctagattgttatggtcataggtgatgatgcctgtgtgaccctgcaaaattaacactagatattctcatgaaaaacaaagcgtttgcttcatatgaccttattctatttgcagaagtaatattctcttctactcccacttaggaaatatcaagtactggaaaaggcaaaatatctcttctttacaaaagttaaccaagaagagaattgcatgctactgcatggaacagatccttcctcccttctgagaccgacaagaaaatcgcataaaggagtactagttaaggtgtggtccatagacgagagactatctgtgaactgtttgtgatcagtaaataagagaaattgatgggtgaagcatgtgggtgggctcctgtaatcacagctaggagagaggattgcttgcgttagagtccatcctggtcaataacgagatactctctctaaaaacaaaacaaaacgaaacgaaaactcagcaggccaccaactaggatactccctaggtcaaatgaccgagcctctaattctgtgattgttgttgctgtgcgcacgttaataaaacaaacaaacaaacaaaaagtgaagatgtttagaaagtttacagtactttggcattgtcctgataatccaagctcctgatcagcagattctattcagccaggtatagggcagttcgagtgttgtcaaatttgtgattcccatgaggccaggctgcttactggtaatgcataaaggaccacatcctggttcgcgaagagtttgggggtagaggaaaaggagggagaaactgatccttcatcacaggtagtttgagagcactgatgtaaactatagtcacacttttgtagtataattgattattatcctcaatagatcatttacactaagtcggaaaaaagtggaaacatcagatatgtgggatatgcgtcaccttgtacatttctcagctggaaaagtgtaaaacatctcaattttgcacctcccttttcaaacatgtctttggctaaatcaatgttggctctaaccgctcgtcctagagcgagtcccgccatcttgtggttgaagatgttgactgccacagagaatagcgggctttgacatcaacagttctgattgggtaaaaagaccctcgtcttggggtagttctcttttgaagtcctagagtccgtcacacacaaacgccttcttcccggtaagtccattgtaaacaacggaatggactttagggaaaggaaaggaaaacgtgttctttaagactctttaaatagcgttttcacccattagcagaattctctgattcatgagcagcactaagtagataccgtgtgcgtgcattttgaatgaattcatttctacactattttayaggagtattgaatagttgggaattggaacccctccagggggaaccaaacattgtcgttcagaagaagacaaagagagattgaaatgaagctgttgatttcaacacacaaattctggtggtagatgaaagcaaagcaagtaagtttctccgaatccctagtcaactggaggtagagacggactgcgcaggttaactacagctcccagcatgcctgaggggcgggctcagcggctgcgcagactggcgcgcgcggacggtcatgggacttcagcatggcggtgtttgcagatttggacctgcgagcgggttctgacctgaaggctctgcgcggacttgtggagacagccgctcaccgtgagttgccccggcttcgcgcctggccaacctcatgccacccagaccatcgggccacactccggagtaactatttcctgatgggtctcggtcaggtctcccagagtctctgggatgtccctggaggctgatgcccgccgaggtgttggtctgattcctagcgcgggaaactcgaaggttctgggggttgttatctggttcagctactttcctgcaatgagggaactgaggcctaacgagggcgagggatttgcataggggcctacagctgataggtgacagaagccggagctggactccaagggtacaatcttctaagcttctaagttactatcagcccttcctgattctcacgacagtgtctaaacaaatactggaatttggggcacggacaggaagcgccgtggaggctcggagaaggaggaggacgtgggagtgttggaacaatactatctagacagagagagggtaggtgggggcagaggacatacacagcggagtggaggtggaggaggaggatagcatggcccaaatcgaagggaagcgaaagccttgagagacgagaacctgttttaactattggagttagtcatgggttctgtattccgtagactgtaaagtgttggaatagagagattaaaaagaatcaagaggttcgtgtagtaacatctgctcctcagagacagttttcagctcattgtgagttctgattactgatactgttcagaggtggtgctagaaatgacaaccacttcttggcaaagtgaatcacaccacttttttattgttctctttatgaagtatccgtggcgaaatgactgtccctktccactgctgccactaaatgaacgttatctctgtggtactttgctcatcagcacgaagacgaaagtagacatgatgatctgggccatttggcgctaatgttctttgatcctgtaaaataagttttcctaggtgtagtttgtcgcaattattacctcctcaatgaggcttttcctgacgccatcccatttttgaataaatcatgagcttcctaagagaattgccatgtcttatccttttatttactgkgcttaacacgttcactctgcaggcaccagtacatggcagttactcagttaatgcttgtggaataaactgaacacattaaaaaaattaatacaaaaaagaaaagttaataatgatttctttagagaatttcccccagtttaaaatacacttggaagaggtgtggtaatatatgtacattgttagtggttatttgtttgtaaattaaatggaattcatggcatataaagttgcctcaacttacaagtcaaagacaaaggactgctctgctatttgatgagtctggaactaaatagtggacatttgcaaagaataggaaagacagagccctggttctcagtttctgatgtgatacaagaaaccaataataagcttcagaaatatactgtgtaaattaaaataccctaaagcctgattggggaagtaagtactcctaagctgccagatgaggagtagtctaggaaaaagttttgtggagaaacagatcctagttgacatttctgtagaacggtagggacattgtttagtagccaaaaggatatcctaaatgggtataacaaggaagtttagagcagatttgggagtgtggtaaagaagaatagggaggaggtgtggctggttgatttgactaactgggtgcaaggtgaagcccaaggtacaggcayacttgtgattttttttttgtttttaagggtaactttcttcagggagccttttgtgacccctacaccaggtttcactgtgctatgtacttccatagaatccttacttataaaaaacatgtatttatatacaatgacttgcttaattgccttatttgccttcgttctccaacagactaggctgtaaatttcttgtggagaaggattatattatttatcctgtatgctcaacaccagtttagggcttgtcaagtaatggatgctcagtaaatatttgagggaggaagggaagaaggaagttggacaaactgttgagagtttggcattgatatgtattttaatgttaatatcctttcatccccattggtatttttaaaaattaaagatgggagtcatgatttagatttttttttggtagcccaaatgtccagaacagtgctaactgatgaggataataaagcaagcccttgacctcaaggagctcccagtctgtcgatggtgtgcagcttaaaatgggaagcgggcagtggtgtgagggagttatcactccatttctccttaggaaaggagtctctgaaggaagtagaaggataaaaagcaaaagaaatgaacgggaataaaagtgacagtgataaagtaggaacttgatgggataaaaatgaatatagggtcatgaaagagaatgacatttgaaaaggagaagcacaaagttaagagtctttagtatcattttaataataattcataatggttaaacaaagacctgtgtgccaggcactgttctcaaacacctcatgtgtattatttcatttaaatttcatgacrgtgtatgaagaaagtgttgttattttcaccatttgacagatgaggaacctgaaacttcatgttaagtaacttgtaagtggtagtgcatagactttaaatcaggcagactgacactagagttcacattcataaccactcctcaaatgtcctcctactcttgacatctagactcaggatggacctgtgttacaggaaggagaggttgttatatttaacaaaagtgttcaatttttctttttcagttggctattcagttgttgctatcaatcatatcgttgactttaaggaaaagaaacaggtaaaataatatttctaaagttaataagttcataaataagtatttgtaattctgtttgtattggtaatttggaagctacagattagaatatttcttaaatgcacccctttgtgcactactacttttctattttatatagaaacagtcgagctgatgcatatttatacaatgatgatttttgtgaggtaatatgacatagtgttcaggattcttaaaggtgatttgaaattaagttacttttcactgttcaaaaagtgcattgttattggctggactgtaatcaaaatatttagtcctttttattctattgtcatgggcttattaactactttctctcttaaacattactaataagtatgtatatttctctttaggccaacaactgtatcctgtagattatttcagtctaaaaattagttttcattcttcctattcactgatgtttacagttgcttctctatttagctttctttttaaaaataatttttaaaagtttttttgaataccagaaatcaccttgctttytttttaaaaaaaatgcatattttttctgagaacacctcgtaatttttccattatgccttgtgctattaatggatacaatctgcagtaactatttatcgtttgttgtaggaaattgaaaaaccagtagctgtttctgaactcttcacaactttgccaattgtacaggtaggtgttttgttgtttacgaagcataatatctatttattcagttaaaaggtacctaattattgtgctattctctagcttgagctgcaccttactctgagtaccagtcttaacgttttcctcaaggctcagctcttcaggaaacattcttttactatcaattcagcattgctttgatgatcttctttcctgaagtcctacaatttttaaattatctcgttatgtagtttaagatatatacatctctttctgtgrctgtattgtaaattcctagagaacaaggactgggttttattgatcttcactatcccttatagccagtaccttttaatgaatactttccactggtaaaaaggaaaatcaattattgtcttttgtgcttttttgacatcatgtcttttttaaatagggaaaatcaagaccaattaaaattttaactagattaacaattattgtctcggatccatctcactgcaatgttttggtaagttaattatttttcttctstccttttggctttgtgagttgtattgattaatgttgaacaatgttgcattttgtcttccccattttacattttccctcgcccccgccaaaccatgacacctgcttgctctccttgtcctcagaattcacacagtgtaatatgtctgttccacttactcatggcacatgtgtagtgataccacaattaaagaatcccttggcaactgttactcattgaactcacgtgcaccagacttaaggtgggtgctggggggtattgccatgaataatagcacaatccttgaacttataaagcttaaagtttaattggcaaggcaagcactgaacaaataataattacaaatgtaaggaatgttccaaggtagggaagtggtaaataaaggatgctctgggagtatgtaacctgagtaagttgatattcaagctgggagacagaagagtcagtaaatgttaaataggtgacaagcagggagctaatgttcccagataggatggattatgcataggtcctgaagctaaggaaaacgtggtattttctgggaagtgaaacaaaacaatagggctaagcctagtgagccggttacatggcataaggttaaagatataaatttgggtgaggattccaagagcagttggaagcccttgaaggttttaactaagggagtgaaatgaggtttgaattacagagaatggattagagggagttaaggagggtacttaagaggcatccaggagggagaattgatgggatttattggttaattgggtgtaggatgattactccctaggtggcctgagcagccaggtaggtaatggtgtaccatttcctgagacggaccatacaaaccagcaggtttgggggcatcctgatgagttactgtgagagtttcaaaagagcccgtcaaaaaagatgtgcacagtggctcatgcctgtaatcccaacattttgggaggcctaggcaggcagatcacttgaggtcaggagttcaagaccagcctggtgaaagtggtgaaaccccatctctactaaaaacccaaaaattagcaggccgtgctggcgggtacctgtaatcccagctactcaagagtctgaggcaggagaatcacttgagccagagaggcagaggttgcagtgagatcacaccagtgtactctagcctgcgcaacagagccagacttcatttcaaaaaaaaaaagatgtggccttcagaagagtgatcccaattaaagatggtgctttggaagtggtcacctgcatgagtaattgaaatcacgggaatggatgagactccctggccaaagtgcattgtgggaagaagaggtttagtacagagtcctaaggaacttcactatttaatggtatgaaagaggatgagctaggattggagactgagaagggactaccctagaagtagaaggacagcaagcaaagggaaaacagaaaaggaggaatgaaaggtcagcagggtcagtatacctgtgtggtcaagcagacaggcaaaaaaaaaaaaagtctgtcagatttattgatgtgacagtccttggctgccttagcaaaaaccatttcaattgatataatagggatgtggaaaaatgcagactgtgctgctgactttgcttaagaaatttgactccataggagaatgggaggcgtagggtggttagtggataagaatctgctgcataaagagattttgtttcttaaatgagagaggtttgggtatgcctactatcaggggagagagaaagtgagattccctgagaaggtgaactgtttcatctttagctgggatggacatctccatcatataatagaagtaattaaggaaagactccctttataacagttactattgctaaagaaattgtgaaaagccaacttttggtgtcttacacacctgcaaggcagcattctggttccttaggcccaggtagacataaatggagctgacttttgataggttgtaaagactttcatttactcttgttaccatgaacatcttggtggttcctttttgtctccttcacaagtgggagtgggcaggtaaaggagagcaaatcccagatcctggctatttctaagacctggaccctgccctgcctcagcacaagtctgcctagcaggccctcttacctgctcaagcacagcacctgctgcttctcttataccctcctaacttttattatactttttctttttacaaaataagagattgcaaaattttagaagatgccaacaagcagagaagaaataccacactttattccataattcagagattgtatgtttgtgtataaatgtatttttttctagtcttttcatatacagactcacacaatttaggtttaagatgatattttctttcttcttcttcattttttttttttgagatgaggtctcactttgttgtccaggcttgagtgcagtggcatgaacgcggctcactgcagcctcaacctatgggactcaagagacccttctgcttcaggcccctcaagtgtctgggacatatgtgtgtaccaccayacccagctaatttttaaatttttttgcagtgatggagtctcacaatgtttcccaggctagtctcaaactcctgggctcaggcagtcctcccacgtcggcctcccaaagtgctgggtttacaggcataagccatcatacctagcctaatttgatttttacatctcagacacaatgtttggtacatggttaaagtataacaaatgtaggaaggaaggagaatgattggtgagatggatatttgtatctaaattctcatgtgcttatgtcttttctgccaacatacaaagcaaagcagaaatgtcagtagtatattagaagtgttccatgattgaaatataagtgtgagtcaatcactagacagaatttcatgtgtatggattttgttattgtatgataacattctttttgtattcctagagagcaacttcttcaagggcccggctctatgatgttgttgcagtttttccaaagacagaaaagctttttcatgtgagtaacagakaagtaaaagaaagtagtgtatatatgttatataagaagtctgatgttctgactttgtagatgacctgttttgactcatctggaaacttttaggatttgttatttatacttggagtttctagaaccccataagggtatatataactggtatttgtggtttttttgttttgttttgtttttttcatgctgctaacctttgataggctcagtttgaaagagcccgttttcttctgtttctttatctctgcttcattcattcaaaacttctcttagctaagtgttgatccatctctttctagctctaaaatcacttcagtttctgcccttcttaccatttgctgctccttgggagggaaaggagcaaggttctattgtagcataaaagtttctacctctgtttcggcttcctcctttgcatgctctgtggtatagcccatatgccagcatgattgtctcagcttttagtctttcagaaattcttcaaaatcagccatttgctagtataatccctcttcttatcttgagagcctttatgaattgaatttcttttgtacttgtaaaattgccatttcattgcctttgcagaagggaaaggagcttaacgtgtatgcttgtttgtcaccttgagacagaacaccctgggcattttaaatgattacagtaaggaaaaaacaactgtaatgcattttactgtgtaaaatgaggtatagctacttttagaaagttcaaaagttacctttatctaggttcactaaagtgtccatccgccaaaagtataaaatgaggtatagctacttttagaaacttctgaaagttgcctttttctaggttcattaaaatgtccatctgccaaaaatataaccaccaaaggtactactctttgattttttttttaaagactagtcaagtgtcctattaagaaaaggggaaagagtagaacaaggaattcaacctgtaactgattgtgaatagtcaattaagataactgactgtgaacagtcaattaagataactgactaccttcagagcagcctggtctttgaggttttaatgttacatcagttttttttttttttaagcaaaattcattctaaaattgcagaaagatgtttttcctagatgtatccagtagatggagctgttgactaaggatgctaacgtgtgcgataaacattaatagttttcaagacatactgtcaattcttaattatttatattaacagaraaacagcacaaattatttatgagtgcctactctttttgttgttgttgttactkcctttaaaaaatgcaattgtaggccgggcacagtggcttatgcctgtaatcctagcactttgggaggccgaggcaggtggatcacttgaggtcaggagttcaagaccagcctggccaatatggtgaaaccccatccctactaaaaatacaaaaattatccaggcatggtggcacgctcgcagctactcgggaggctgaggcacgagaattgcttgaacccaggaggcagaggttacagtgagctgagactgtgccactgcactccagcctgggcaacagagtaagactgtgtctcaaaaaaattttttttaaatgcaattatagatattctcaagaattttgttttagttaaaggggtaagtagaagcaagtgatttttagtcataaaagacacctgtagaactttttaaaatcaggcacattcagccctcaccactggagactttgttccagtagatttggggttgattctgggtatctgttttttcatgttctgtaagaaagtataattcagtgccaaaaccactagtgtttaatataaggaagaccatgggcatttccaagtttgttacaaaaccaacagcaacttagtttgcttattaaataatagcaactcagttgtgatttagaataaaagttgcagatgtaccaagtattttgttgtacatttgatttctggattaattttgaagatcatgcaacttacatttccatatccctttactgatgattagagaaacaaaagaaggtatacatttgtaaaacctttcaaaaacgtttacatatttatttcctttaacttttacgacaatcccgtaggataattgggacagatatttattactatcctcattctataatggagaaaactgagattcaggctgagtgatttgctctaaatctcccagcaagtttgttctaaagataggactttgggttttagactatgttgtaatttcatataatagttttacttgtttatcttactgtttttctcagacttaaagtttgaatttggtgaacacatgcttgatgatagtagatgggcctgtcaaaaatactttggaagatggaagaaagcacaaagtattgactttacacatatactcaaaaagttaaatgagaacgcagttttaaaaatgggaacatcttcctcttctctatccaaatattacccattccttaagattaaattgaaattagagttctccttgttttctataggaaatcaattttaaaagacatctttcttttaaagcttttataggtatatcatggtttggaatcaggtcaaatgcaagcagtttgtgtcttaagttacattctacaagtgattttatttattttgtttgtaagttgattatctagaattctaacaggtatctatctctgtaggtatggtattctaaaactaagttaggtctccaagatgagtcatcaagcatacacacacagacagacacatgtttatgtcaatagtagtataaaatcgaaccatcttaaatagcatcatttccatgggacataatataccattatattttctactcagagtatccggaagatgtctcatagaaactccctctccatagctacttaaggagataaggcagagattaaagattttgagggggtccattggttagggctccttgggatgggggacagctgtggaatatgacacagagagagagttgcatagaagcttctggagcttctggaccaattaattattcccatttaggatttaaagcagctgagcaggttgaggagaattcaggttatttagtccagtggtctctaacctgctttgattgtgcaccctatcagtttaaaaaatttttgagcctgcttccaaatatatatatgtttcttataaattattcgcatctctcattataccagtgtgccttataaaaactacatacacacaaaacagatcttaagatagtgaattaaaaattaaatgggccaggcatggtggctcacgcctgtaatcctagcactttgggaggccgaggcaggcagatcacgagaggccatcctggctaacacggtgaaaccccgactccactaaaaattcaaaaaattagccaggcatggtggcgggcacctgtagtcccagctactcaggaggctgaggcaggagaatggtgtgaacccgggagacggagcttgcagtgagccaagattgcaccacagcactgcaacctggatgacagagcaagactccgtctcaaagaaaaaagtaaatggaggctggatccagtgccttgtgcctgtaattccaggactttgggaggccgaggcaggatgaccacttgaggccaggagttcaagaccagcctgggcaacatagtgagaccctgtctctatttttaaaaaataaaagtaaatggaaataaaagttttattttcttcctgctcctgaaattcatgcctttcctttgcagaggactgttgtagtgtcttgaggaagggagtgtcctggtgttacttgcagtatggtctggctccactggctttagaattacctgggatatttattaaaatgcagatcattaggccatacttaatgaatcaatggaggtagggcctggttgtctccatttttgatacattctttaggggagttttgtacacattaaagttgagtgccactgttgatgggcatctctctttttccttggtaagcctgattgtctcttcacaatttatcaaactgatacctttgaaagggattcagggaggaatatgaacccctacagtcctattccttttgtgccatagaggcaaagatgtgtatatatgtgtgcatttttatgggaatacgttttctttaaattgtcataggagtctctggccaaaaaaaaaaaaaaaaattggtatggacaactgatgtgaattattatgtaacctactagttttcagagaaaaccattataagattcttaaccccaaggctctattgggcataatttaatcttctaaaatgatatagaaagcgtttcattgtagtgtgaacattaacttttattttgtggttatctaaaagtattgattgaacattttggttaatagaaaactaaataacaaaataattcagtttggggcattctaaggttgaagtgtcagagggagccatgtggagctgtcccttgtaactaaaagtttattataatgcatgtatttgcacgtacttaaaccaacatagagccattgtttaattggccactcttatgtaggaaaagggaagaaaggaacaatgtgtaagtaaaaagtaacctaatttagctttattctggggagaatgtttaacaggcttttaaagaattaatcacctttttaaactgaagaaataatttacattcacaatgattaatttaaacagtacaaaggtactgaaaagtatgccttacttccacctaaaattccttccccattttttccagaagcaaccactagtaatagtttttgtgtatctttttagaaatattatttacctcgtctttttttcctttgttctcccctttctcccttcctctttccttcctacctaacaccatgcttcttttaccttacagtttcttagaggttgttccataatatccattagagatgtacatcatttcctttaatgagttggcatattccatcakataaagggatcataattgaagtaaaattgagggatgtttaattgtgtctagtctttcatgattggtattgcaatgactgtcattgtactaatgtcccctgagcctttgtagggtatatagctacgtaatatatttttagagtctctgcacttatagagacttctctataggagactccacttatacctactacatacctataagtagaattgttggtgtgtgcatttaaaattttggtagccattgctaaaatgcttttcaagaccttatactgatttaaagaccttttgagtgcctgttcattcattctcatgtcagcaaggtagtaccaaacttttttatctttgccagtatgatcgataaaaaatggtgaacagagctgaatttgtttcagctatcattcagagcttttcttcatccactcttattaaattttcagtgactcttttatgagttggacagctgtggcagttgggatggggcagattctttatgagccaagtatttctgccaaaacaacattgcttcccargcttactaagttactatgactgtcttaaagctagccagcctctgatctctacttcctaaagccctggggttggagtaggagtgactgaagtggggattctgaagaaaaagggcaagatacggtattcctgtcattgccgaaggttggcaccaatcctataggtcattttctccactcttccttactctgccctttcccctggtacatgccactgatgttgtttgtcagcgtagccatcctggaagtttgaatttgtctgtcaagcctgtayacactagcattgtcagtaagctttgtttttaatgtaatacataacagccaaatatttttatcactataaatcaaataatggcaaaatcagagccaggtatgtttcttccagcagtgtcttctggcttgccctctacactagtaaccttttcccagctttatttttcttccctgattttccatttatcctgattttcttatctgtttattttatcttgtatgtggttttcataaacagtttcaaatctctttgagaagaaaatgcagagtattactcaacaagtcatagcaaaaattaaaacaacagaaagggaaattaaaagttgagaaaatgcattcattatcatttgctttgtagtagctctgctttaactatttatgtagattccttctattagtatttgaacaaatgtcatgaggtgctgtgttcatatttctttagctactcagtagacttgataggagccacagccctgggacaattcttggcacagagttgctcaataaatagtgtgtgggataaatggactatgcatacattccatttggcttattttttccttgggttttagaatagtcagtttcttctttctgggacagtctgaagtaaccttccagaaactgagcctcgctctgcaacccatccttatgtagaagaccatatgagttagagagtctccaggccctatcttttgagaaagtctgtggacatattccrcttttgctggattacagttaaaccatttaaaccaaacctaaaagagtagcaaaacagttgactttgtaaaaggtcagatgtatttcaacacagaaccatcaaaacacctatggagtgaaccatactttatatcgagtttgaccctatctcccattcttacttgtgccaattttccttttggccttacctatttttttcttctttacagattgcttgcacacatttagatgtggatttagtctgcataactgtaacagagaaactaccattttacttcaaaagacctcctattaatgtggtaagtgtactttccattctgtatttgartcttagaaacttacattagcaaattggaaaagaagcagaagaaatcagtgttcttagaaggaaaaacaaaggctagggaataggaggcagttttagaaaagagaattttcgttttgaaagctgaacaaagggagaaagaaagcttaaaattaaaaatatccagttaattattaagatgtttttaaaaggccatagaacccaaaatttataaaggatatttcttaagaggatagctaataatcatgggtacttataacctgaacatcaattattaagggaacagagcagtcaaaaaagaagaggaagggaaaaaataaaaagcagaggatccttgaggcaccaggaagctaaagagagtcaagagggaacagggcatggcatcacatagacgtggtctatgcaaaattaaaatctgtgttgaagcatgcttattcacaaagagcccagagttacttttatatgaacctaataggatggccatgtgttcagaaaacttttttgtttctccctctgctatagaatttttctcattccccttctacatagttttctcttgttttcccatacccttcatcttctatctgtccattccttcttctgtcttaatttcctcccatttccatcataaggtaatattatttcacaccagtaactattttagtagcaaaaggtcagcacagctgttaactatttgctttgccagtcagatcctaggaggagttcagatgctattttagagtagtggcttccaaaaccctagtctcctgttctcaaaaactggtatccaaggagaaaaaaaagagtttagcaaatacagtcaaaattacatatccaatcctgtcagaatcagaagattaattttttttaagtttttcaaaggataattcccttgctcttttgcctctgtagaatcataactttctcaattttaattctctttggtgctaaggaattggcttgagaattagagggagacagtaagaggagaaaatggaaaattagtatgtgaaaattcagtgtggcaaaaattattaktagtagtagtagtagtagtagagacagggtgtcactctattgcccaagctagagtgcagtggcatgatcatagctcactgcagcctcaacttcctgggatcaagtgatcctcctacctcagcctcctgagcaattgggactacaggtgcatgccaccacacctggctaatttttttatgttttgtaaagttgaggtctcaccatgtttcccaggctggtctcaaactcctgggctcaagcaatcctcccacctcagcctcccaaagtgctcagcttacaggcatgagccaccatgcctgacccacccaatggggaaaagtttaagttagcttatgttctacccctaaaaatatgctactcaaactaaaaatatatcatcatatatttcaagggaaaaacataaaagctcttgttgggtaaattttttttttttttttgagacggagtcttgctgtcacccaggctggagtacagtggcacgatctcggctcacttccacctccacctccctggttcaagcaattctcctgccccagcctcctgagtagctgggattacaggtgcacaccaccatgtccggctaatttttgtatttctttttagtagagatggggttttaccatgttggccaggctggtctcaaattcctgaccttgtgatccgcccgcctcagcctcgccaaatgctgggattacaggcgtgagccaccacacccggcctagggtaaatattgacagtactagtgaacataacaatattggctgagctcaaatcattggttccttgtgttattgccagtacttataaataaataagtaaacagtgaaaaaccactgaatcaccacattttcgagttggaaatctatgttgtgcaacagttcatttgtcaaatgtggggaaatgaaaaactacaagaagtcattcagttctgtagtcacacagggttaggaaagttctgattggttgtctgtcaagatctctgatgtgccccaggtacctatgataaaagccacaaattaatacagtactcaaggttatggcagtcttgttggcctcacatattgtttctctccagaggtagcaatctctgtctttagaagtttgcctaacctttttaccagcctcaaactgccaatacagtttctgtggaagtagcacccccagagttgggcactatagctactcagcaaattgctagtgaacttgcaactttttcacctttttcttcatcttaatgaactaggaaggtcattttctagatggctttgcctgaataagcccacatacgatactgtgaccttcgatgggaggagctagcatgtgatgttaaggccaagtccatggaatggacagcaatgcacaacagataattcctcatgtctcacgacagtggtaagattcccagtggctgctttggtgagagcttttaattggggttcttaggaacttgtattattatttaaaccagagtgtgagctcctagagaacaccggctgtcatggtccttttttaagtactccactatcttgcgtataatgagtcctccttacagtttgttgagtcaataagtacatgttgaacttagcatatcagggtacagcataggggacctggccaaattctgctcgttgttagtcaccagctggatgtccacattcatcaggaagtatatgccgtgagggaagtggggcagtggggcaacatgaggaggacagtggcactcaagacagttgacaccaggacaccccaccccctgattccattgggaagttcaggaaagctcctttcgtttgatgggcatttttcgcttaattcctacatttttcaatttaagaattctgaaaagtaaaaaattctgtcaagtgagagggatatgcagtttaacatggtgtctgctttaaaaaaaatctggtgtgaacattttgcatatgttgtttaataaaaactagatgatggagtggaaagaaaggctgcacaagattatttttagtcttcatctagtagaagagtaggctgcactgtgaattggtcaggaagcagaagagtccctgttaatttattcacctattttttattaaagagagaaagttggaaacatacaggtgtctagcttgttgttcagagtaaataatagttgtggcataggtatgtatgtattatttgtaacataatatccagtctggctgtggagctgtttgtctacataaagtatggaaatgtatacattgtgagagcacagtcttggtccttgcatgttcccttggctttgagtgtaaacttgtttttggccttgagaagttcatagattggctttaaaaggatcactttataaggattacttttttttttttttttttttttgagacagagtctcgctctgtccacccacgctggagtgcagtggtgtgatctcggctcactgcagcctccgcctcctcagttcaagcaattctcctgtctcagcctcccaagtagctgggattacagacatccgccaccacagctggctaattttttttttatttttaatagagttggggtttcatcatgttggccaggctggttttgaactcctgacctcaagtgatccacccgcctcggccaggatactttaaattaagcacagatcttaattttgtcacgatktgggcccttttctttggttgtggtgaaaagcagtattaagaaaggtaaatcattcatcttttaccaataggccagatgccatgtgagaatcatcagcttggaaggttgggattgtgaaggagggcccaggagctctatagcataccaaacactccatttgtgtactttgcagctcttttcccttttgtcatcttcactgtatgcttagggcaccataatttcaattatgcaatttcctctaaaatctcccacaaacctcttctggagtctaagtaacttgtcatcgcatttctgtcatgtgatagatgtgtttctaaaaaattggattccactccttttcttgaataatcacatgacttcagattatttagcattttatgacataagcagtttgatacctgctttggcccagcagttttgggatggggtagatgttaattatctccatatgcaggtaatacagtagaatcttaggtagttcatggttcacacagttaaatgactctctcaaggggttgacaagggatttgtactcaagctttgattccaaatctgctgttatttcctactgggaaatgctttttaaagttactttacagcagaactctttgttaagcacagagtaatttcatattttaaaacatgagctttatgaattcaggttgtgagaagaaggatgttcttaaaacagcacgtatctctttactttccctttgatttttttacaatgttatttccatttcaatgttattgtcacttaacaatgacttcaagcttattgagttattttaagggatcttatatgttttacactctctctgatgttttcccctcagtccttcctttaaccctaatccatttctgtcttcgtggtccgattactccccactgagagatgtttagtaagtagtatctaaacagtgaggtagttccatgaatcatgctataaatacttgatttggatgtgagtgttctgtaaactttgttttatcacacatgaatctaatgtgttaagtactgtgtccattcagtgccagcaaattgtgccagtattaaaaatttctgtggaaaaaaaaaatgcaaacaacaccagaaacaaggttaaaagacagatgacaaactgatggaaaattttcactcatgtcatagacaaaatgcttattcccttaacacataaagaccaaagagtgcctagaaattaataagttaaaaaaaaaagatgaacaataccaaaaaatggattaagaatatgaaaaaggcatttcacagtaaaggaaatgcaaacaggccttagacatatgaaaagatgattaaatttatcatagtaagagatttcacattaaaatcacctgtgtgattagagatacactctgttgtaaggctgcaggaaagcagacattctcatattttgctcgtaactgtgtaaatgrgaacagtccctatgcggagagtgggtaatttggcaacaactattcaaattacaaatacgtttactgatttaaacaacagttttaaactgtatgatctcacagttctgaagcctgcaagtctgaaatcaaggtgtcagcatggtcttgttccctctgaaatctataggaccaccttccttgcctctttttagcttttggtgattttctggcaatctttggtaatcctgggcttgcagctacgtaactccagtctctgcctttgtcttcagtgtgttctccctgtttgtctctatgtcttcacatggccatcgtctcataagacaccagtcatattggattaggggcctaccctattccaatctgacttcatcttaactaattacatctacagtgaccctatttccaaatataagattacattctgaggtactgaggtttagggcttcattgtatcttttgtggatgaggacgcaattcaacccattatgcctagcaatcccactttagtgttattctacagatacactgaaaccacccaaaggctctcagtagaggtttggttaaatacatgctatacctctacaatatgatactctacaactgtaaaacagaggaagttatgagctgacttggaagagctttcatgtcaggacaacaatgcagcagactaccttttggatargaaagaaaaatagtatctcttcgtatttgcttatagttgtatgaagaaactctggaagaagacacaagaaattaataaaagtgattattggaggaagggatagggcagataggattggagatgcaagtagtactttttattgttttcttatgttgctttgtgagtcatgtggacaaattacctgtcttaaacactgaaagggtttcattcatttgaattgaataaagaactaatttttatgaaattaacagggaatcagtatattgtcccagtaatcagctccttactttcttctcgtctttctctaaggctttgcttaatacttggaattttagtaccaatgtatcttgattcaactgtcacacacctgtccttagtagcatctttatgaccattatttttcattagtaaagaaatgtgatcatccacccatgccagaacctttggtcagacatgagaacaaaagctaatcaggcaggcactgttaggaagaggctgttaggaacaatcatttgatgagctttaggcaatttgcatcaaaatggtcttacagcaagatcccaggtaatgagtctgtattttatccatctaaaaatttaaaataagatgctatgaaagaaatattcacaaccttcaatagcacattatttttaatttttctttttcaagaattcctatagcagttttaaagtgaacttgattaatgtaccaagatgaaaatcagaactttttccttaaaaaataattatgctgataatatcctttttttctcccctccccccgcaaaagttgtttttattttgatttggtacccacaagggtctagaaatttagattcagtcaattaggaatatttcgagatctaagcatccaactctatatatcattcacctctttcatttatttcccctcttcatcatcctgttgccttgtattatcgttccacaactagaaggataaggaaaagaaatacaggtcagcctcttcagctaattagtagttttggtaaaatatatagccaaggagatggctgataatatggctaaaagggatgtttttacttatctgtggtttttggttagccaggtgcaycgaggttcctttgatgatggatcatctataatgaacaacgttatcacaggacatcttctccataagctgctatttattcactcaaaatataaatatattatacaccttttatgtaaaaggcagtctagctctcaagaagtgtgcaagcttggcagagccaatgagatacacgttcaactaggacagaaatactatcttaacaaatgtcattcccagaaataatcaacacaggtgaaagaattagagatggggaaaagtcaaaaaatgagagagggaaaggttgcagtgtggaaaatagcatttaaattctaaccaaactagaatcagacatataggaaaatctaaaataaaatctgggagccttgaagccggaggaagaattaaggaaatctgtgttcgggagggaaaagcagaaggggccttcaagtacaactgaattaaatcaagatggactgccagttctagaaaaagacaagtttctccattccccgtaaatgctcaggagtaaaccccagtagtcacagctgggccagtcccaacttatactytgggcaatcgaaactcatttgccaagcagagacttggaccatactgcctagaacatgcctaccattctttctttattcttttgaaagagtactgccactcaagtgacttttgcaattgagagtctgattatcatctctatgctgaaaatccttcagatgttttctccattaggaataatcctcatcaccagctctaaaggcctgcacagttggcccttcccatcctctttagcctgtcttcctcattatttttctccagcatttgaccttccctacgtgctgccatgctgcaaccttgaagacttttgcatgctctgacctccctctgaaagtgcaccttcctctactatttaactgcttaatttcttcctcaaccctaaacttctccttgatagcacttaacacagttgaagttttgtatttttgtgtggttattgatcatctcccccactaaaatgtaagcttttagaagggagaaaccatctcagcttttgcacgtagtgggcttaaaacatcttttgtgaatggatgcagacatttaggtgctcattaggaaagctgaacagtatggtggttaatttcaatatcatttccactcatctacttacctgtggatccctctgtagtaagagtacattaaataaagaagtttctgtttctcatgaaaaaagccaagcttgtatggtgagctgggcaaaatcttcaagggcacttccatcttttttgctgtgcggctataagcccagtgaaaaatcaggggctttattactaaagaaaaaggagaggacagatatctgggcaatttgcaggctttgcagtaatgctttataaaggtattgtagtaaggattaaatattatatataagactctcttagcatatagtcagcactcaattaactatggctgttattctctcttcaacatatagagaataaattacttacctgaaagaccttcctgcccttggttctttgggcttttttcagctcttcatttctttgtctctttgtgcattcataggtcagattacttggtttactatgtttgtatacagtttactgtaaatgtagggagtacatttctgttttccttttgatagttcatggagtagtagcccctctctcacsccattgggactttgttcttcttagcctcttcataattcctgtttatgtaaagtcagcttccccacagccaagttaaactctcttaatcaagtagagccayggatttattttcttctccttgtgggtggtgccatttgagtgttgatctgtctttcataaagctgtaccttgacatgtaaggggtcagtagtagggagtgaggagggatgtgaagagagaatcagtgaaaatgaagtaggccagtgcatgcttatctctgacagttctctttatttcctgtgaargcgattgaccgaggcctggcttttgaacttgtctatagccctgctatcaaagactccacaatgagaaggtatacaatttccagtgccctcaatttgatgcaaatctgcaaaggaaaggtatggttctataattttaggatgtttttcgcatctggcagtttattattagtagtacactggaattgtcaaactgactccttttccttaaagcagaatgttctcatagcataggaacaaattctgccatttcagtgagctctgcaaattttaagggaaagaaaaataccaagggaagaataatgtaagggagaaaaagatgtgttggaagccatatcttttgataaaaatttgcaatttacatactgtgaaagaaaagtctagaataacaatggtcctcactgagttgaattaagatatgtgaccttttcatcttgttttttaaacttaattcacctttactaagatctgttaggaaaacatattttgttttttattacagattgcctttagtttgacatgaagtcttttcatttttttcaccttaattatttaccttatctttaaaagaagttggtatttgagccttaaatgttaaaatatgattactggctatttatattatgaaactcctttttttacatttatctaagattaatattagtcactttctattttgtagaatgtaattatatctagtgctgcagaaagggtaagtctagcatgaagtactttgttttcatctttcaggttataaaacttttcagtttctaggggataaattaaaatagtaaatgaatatttgttgcatttttttctattttaactgcatttgctcattgtaattgctaaatagtaaaatttatccccactttctttaggcttcaacttttgtttatataatcagtttttcttttatactgttacaaaatgcctttcaagcttctcttatattttcaaaagctatgaaacccatcaaaattataaggacttaaatttatgtaatttttttatttttggatacttaaatwttctattaatttgctataagtcattgaaatgttataaataattttctcatatmtactctttgttcattttatttcagcctttagaaataagagggccatatgacgtggcaaatctgtatccttttctgagtaaaaagttgttgacattgtctttcaggaaattttgaatttgaagtcgtattatagttgaacatgtatttttctcaaccttttactgtaagtttaccaattaataacttcaaaaataaattatataacattatagagagctttatgcttctgttttttaattaatcatgagatagaaaagagggaatgagggacttcatatgataaaagcttagagttaaatgagtcttttctcagatgcatgttccagttggactaagaactgctgttgaattaattagcctctcaagatgaccaggttagctggcactttctgttatgtttgtgttagtctcgtgtccttgggtgactctgggttgaaatctttaatgctcccccaagaggcttgctgtttgggctctctgaaagtgacgccaaggctgcggtgtccaccaactgccgagcagcgcttctccatggaggtaagcaagttcttccagtacaaactgaatggtcatgttaaaagcaagtcatttttacagccatacctatttttattgccctaccctacagagttcctttgggatcatcttttctcaacctgttctaaacacagtcatcagtgttttctcaccctcacttcaggctttactttctaaagtttgtagaatgaatatagttttcattacagaaataagtattgaatagttcttccagctatacatgtgtgctcctgccgacattttgataggcttctaatctcccttccttcttctccctcaccagaaggccatgctttccctgttgaaaatctctgttttagagaacggatatgttaaaaatatrtgttaaactatttattaggaaaacaaaaccagcaaatacatttttaaaaatccaactaacaaaacatagactgtaacttttacatttattataactcagaatgtttcttttctcatgtttgcttacatggtcaagttgtgtccagactgtaccttttttatttttttttctttttctaaatagagacagagtctcactatgttgcccaggctggtcttgaactcctgggctcaagcaatcctcctacctcagcctcccaaagtgctaggattacagacatgagccaccatgcccggccagactgtacattttttactcacattttgtatatgtaccttttcactgactgagtttcctgctcatcagatgttaaaaattgaaagtatgctgaaactttggaaaatgaaagtgaaattttattaaaacaatttaagcttttgatcactgttttgtcttcgttatctttataattcttaggactagttgtagtggttaagaagcaatttcattgatatcacccaagtgaattttaaacttcaaagtagattgctacatatagactgagttatttgtcatatgaatagctaggttattgagggcttgtgtgttgggctttattgatctgatttccacttgagagaactgcttatgtattggcttgccgtaaattagatgattttgcttttagtttcaacatttttagtttgagatttttgtattatgtagcctagaactcatcacataagctttgggagtggtcaaattaatggagattttgaataatgattttcttgaaattagggaacagttggttcacactttgatagttctgtcattattttgatctattttaaataaacattcatcaggattttgagtaacagttggggttccaaaatggactaaacaagaaacagaaactaaaatataaatacatacataattttatatataggaaaataggaagtcctgcatttgactttaagaactcagctattcagcatataacacataatatgtaaagtatttttttttagaatttctttttgtgggtacatagtatgtgtatatatttatggggtactgagatattttgatataggcatgcaatgcataataattacatcatggaaaatggggtgtccatcccctcaagcatatgtcttgtgttataaacaatccaattatgcttttttagttatttttaaatatacaattaaattgtattgactatggtcaccctcttgtgctatcatatactagaccttgttcattctattttttttgtacccattaaccatcttcacctccctctcagccccccactacccttcccagcctctggtaaccatccttctactttctgtctccaggagttcagttgctttgatttttagatcccacaaacaagtgagaacatgtgatgtttgtctttctgtgtctaaaatcaggcttttatagaagctaaacttaaagaagacttgtgaactttgggtggcattaccattcaccccagtgtacccaggacagttctagtttatgcctgctgtttctgtgaccttattagcacttctattccctgaagagagtcctaaactagatgataaaatatggttaccctggttttcgttgccattgggatcagtatgagacggtagtatgatgtgttcttaagattgctaattcagcctaggtaatattagaagaaataaaggattctgagacaaggaaattcaaagcctcgttattatactctcattgatgaaatctcagccggcatctgtatcattctgagtgccacatttaagaaggacagcagtgcactgaaacactattggaaaatgtctactcagtccttaaagggtctggaagcctcatgatgagaggaatcacgagggtggtgcagacatggatacctggcaagcagaagagttgggacacatggtagttagctttcaacttggaaggcttgccacaggaaatcagaattaggttctttgggggtccagaaatctagaaaccaatgaatagcaattctgaggaggttgtggggaaaggacagaggaaagaggcccaaggtcagggtctttggcctgtgattgataaagttcatgccctcaatcagcccctggaccaaaatgaacctgttggggacacctgccttagccccttgtgaacaaaattattcactcgtagataatcctttagattttccttggcaagatgattaaaggaaatactatatgtgaaaacattttataaactaaagcatacacaaatgtaacgtcttgctgttaccaagaaatgcatttatttttaaaagacactaaagaaattaatgcattttgttaaaaagtgctgattttcataatgtttatatttcagttgatttttagactatgggtacagaatcagtgacataaattaatagctataagtgtgacgtttttcatttggtgaaatggaaatcattgacagtttttattttgaggttcttattatgttggcattttaatgaccttgagagcagttttatcccttttacaaataaaagtgttttaaaataattggcagagtagatttactaagttaatcttgataaatgggaaaataatgcttaacactttatggttgactttacgtttattacttgaaataaggaataattcatagctaaatttctgttcaagttcttttgattctgccacctttgtagctaatgggtatctctctctttctccataatccctttccatttctaaggacagagtttgggtctgttttcatgacactatggcctttcataagttacccttccaaactctattttctcctaatttttttgtattcctacttcacatcagccatattgtcccctaaactattttacctaggttcttcttatctttctctccatgcctttgtaaaggaatatttctctttttcttactccgtttaccctattctgagtagtgtcacctttatataatacctcattgctttaaccaggcagttaattcttgtggatgcctccattcctattatatttgctcttattgtgcttctcgcatgcatgtagtatagggaaaagcactgtctgttaggaatcttaataccctctgtatggacacagtgcctagcctattagtaggtttctaggaaaaattggttaaatttaagttgaactctgctgccagcctaatctaagcatttaataatttctatttattctttgttcattgtcaccagttaaagagatcaataaatttatgagtgattttattcattaactcaactagtatttactgaacacattttgcataaccaggccattgttgagtgttggcaatayaatgcaattgattcttcagaggtaccttgatgttctaataagagagatagggtacatgctgtaaaatgaggcaagcatgtgctccacatgggagccatacacttgattgctgtgtttgctctcttgatttgtctgtctaccatatataaagtgtctgctacatcaatgtctgtgactgggttctggctacataagatgccatggacagaccattagagataacactgtcctgcagttttacccatgaggtaatctttaggaatgaattagatgttaataatatactgatatttgtgtctgttgggaaaaaaagataatgacggtaaatggcactagcagccatagcagttcattatggcttatcatttgctattgctgtaagccaaagtaatatgttaaaccacctcattttaaattatgtcttaacttcaagcacagtggtttccctgtttgttttacagaaactagaaaaactgcttttggaattatctctacagtgaagaaacctcggccatcagaaggagatgaagattgtcttccagcttccaagaaagccaagtgtgagggctgaaaasaatgccccagtctctgtcagcactcccttcttcccttttatagttcatcagccacaacaaaaataaaacctttgtgtgatttactgttttcatttggagctagaaatcaatagtctataaaaacagttttacttgcaatccattaaaacaacaaacgaaacctagtgaagcatctttttaaaaggctgccagcttaatgaatttagatgtactttaagagagaaagactggttatttctcctttgtgtaagtgataaacaacagcaaatatacttgaataaaatgtttcaggtatttttgtttcattttgtttttgagatagggtctttgttgctcaggctggagtacagtggcataatcacagctcactgcaacctcaatcctgggctcaagtgatcctcccgcttcagcctctcaagcagcgggaactacaggtgtgcactaccacacctggctattttttttttttttttttttttcccttgtagagacatggtctcactatgttgctgaggctggtctcaaactcctaggatcaagccatcctcccgctttggcctcctaaagtgctgggattacatgagccaccacatgcagccagatgtttgaatattttaagagcttctttcgaaagtttcttgttcatactcaaatagtagttattttgaagatattcaaacttatattgaagaagtgactttagttcctcttgttttaagcttctttcatgtattcaaatcagcatttttttctaagaaattgctatagaatttgtggaaggagagaggatacacatgtaaaattacatctggtctcttccttcactgcttcatgcctacgtaaggtctttgaaataggattccttacttttagttagaaacccctaaaacgctaatattgattttcctgatagctgtattaaaaatagcaaagcatcggactgaaccaactttggaaataatttatttttataatgggatcatgttaagtagaagtagctttttatgcaaatacatgcatttatgcaatattaatgtaagggctctaaaacaatggagtagagccagaggtataactgaataagaaatttttttaagcaagagaaagacaactgttctgcgggttggagaaaatacaattttttttttttttttttgagacagtctcgctctgtcccccaggctggagtgcagtggctcgatctctgctcactgcaagctccgcctcctgggttcatgccattctcctgcctcagcctcctgagtagctgggactacaggcgctcgccatgtatttagcagagacggggtttcaccgtgttagccaggatggtctcaatctcctgacctcatattccacccgcctcggcctcccaaagtgctgggattacaggcgttagccactgcgcccggcccgagaaaatacagttttaaaaagagaaagctttataacctcaccaatgaatacaaatgtttaaataaaatattgattaaaaaaacattaaaagtgcatcatgaccaggtgaaatttattctttttttcttcttctttttgagacagggtctcactctgtcacccaggctggagtgcagtggcacaatctcggctcactgcaacctttgcctcttgggctcaagccatcctcccacctcagcctccmaagtaagtgggaccagaagcatgcaccaccacatcccagctaatttttgtatttttttgtagagatggggttttgccatgtccaggctagtctcaaactcctggcagattcaagcagtctgtccgcctcagcatcccaaagtgctgggattacaggcacaggcatgagccaccatacccggccttccagttctttttaatgcagtatcctttatcatattcataggtcaaaagagaaaaatcagaatatttttaatagatgccagaaagacatttaataaagttaaatccactcctgatttttaaaatgacaacaataaaaacccatggcaaaattaaagtagaataatattgtatgcatacatatatatgttcatatgtgtctgttttttgtgtatattaaatgtgatggctccaaaagcatttttgactaccgcttggccaatttgatggattaacctactcattccttctgtaaaactgaggctggtgctgctgaggccacacaccaaaagtctgccacttccttgtgtgccagtttgcttttttccttcaccctgcttaagttcaccaaaagtcagctgtgtttattcacaaatctgtttaaggcagctgtgtttagcattgtatgtaaattatttttttaaatatgaaaattgatgagctattgggggcaaatgaaaaattcccgggaaaactaagtcaacactttggaaaggtttggaaaagagtcattacaaagaactgctgtcaaattagatgtgagaaggataacaaatttgggggtgatcagtaaaaactctgcacttggattgcttcactaatgtcaagttccttttctgctttaaaggaactagaattcaacaaagacaacttttgatctctcatcagagagatcatactcccaagaacaggctttgacccttctttaaaaggttggtacccaagtatacatttatctattttaagcttaaaatgcttaacaggatgtatgttcaattttttgcgatgtcccaccttaatttatgaattagtgatgtaccagctacagttgcaccagatacagtaagattttcatgttatagaaaggaggtaaaattatttgcagatacgactgtcttggaaaactcgtgaaataaatgggaaaaaagtagaaatacaggtacctttcagcttacgtccatttactacacatttgtgtagtatgtgtttgcagttgtgcgtgctttctattcatacatgtttatgccattgttcatgatagtagggcatgatggctgatcaccagtgaatagcagaggcaagtttccttctaatatttactttcgttagaatgaaccactaatttaattgctacaagatgccaatacctctgccaaaccaagatgaagtttggcagagtggccaattgtataaatacacaaaaaccagattttgattaataacctgttaaataattttaaaagatgacactattcacaaagacataaattaccaagaaatgtgtagggcctctataaagaaaacttaatgaaagtaataagagaataaagggaaaataaagactagaatacatggaaagagacattctgttttcttgaataagacaaattgtaaatcaaattctcccccaaattacgcatttaacaaaatttaaaatcaaaatgcttataagtattttttgttttcttgtttatgtatttggtctttggacttggtattctgaaagagtaaatatgagaattggaaatttcaggaaaaaacctaatgggagggacttacaatgctgaatattacagagtataacaaaactctagtactgtaattaaaactaattggtgcagaaattcagaacagtgaaaagagcaggaagtccaagatcatactttagatataagaagaaatgatggattgattgttcagtaagtgatactgaaataattggttatctatttgggagaggcagtacagcataccagttaagtgcataggggaaagaaaaactaaatgcatttaaagccctacttgctagtactcattagctatgaccttgggcaaattatgtaacctctctgtgcctcgcttcatctgttctccctacctgtcacattattgcaaggattaagtaggttagtatttgtggaaggcttactttgaacagggcctgtcatataaaatgtaccaactacagccgggtgccatggcttacacttgtaatcccagcccttcaggaggccaaggagggcggataacttgaggtcaggagttcaagaccagcctggccaacatggcaaaaccccgtctctactaaaaatacaaaatcagccaggcatggtggcccatgactgtaatccctgctactcgggaggctgaggcaggaaaattgcttgaacccgggaggtagaggttgcactgagctgagatcgcaccactgcattccagtctgggcgacagaatgagactctgtctaaaaaaaagaaagtaccaactattttattatttattacttcattatattaatttaaatattgaagtgtcagctatcatttaggaaaaaactaagtcaaatctctatctcacacccaatacacacccatagtaaatccaggtagattaaagatttaaattttttaacaaacttgtaaaatactagaggaaaatgtaagttaattaaaaaaataataatcttggattgcaatagacctgccgagcatggtcatcaaagccagaaaacaaagtttgattgatttgtctctacataacaacaagtaggaaagtacatttacaatacatattccaggaaggtttcatatgcttagcttttaagaattttttttttttaaatacccaacatgacatgctgttagcatccatagagatccccattcccagggtggtgtacctatattgccagtgcttcagatgttgggtactaatgacttatcttcacccttttccagaggattgtcctgggctgatgagagtcactttacctgaagatacctgggaagttttgtctcctctgaggttggcccatggccagtgactgatgcaggacattacagcctggcccactggcctcggtggtacaatttatgctcctgagcaccccatgggattacgctgtgtgtggatttctcctgaaaccacatatttgcctcttctgccctgttctgttttttctcattcccttatagaggactctcagtaagtcacttacacaagaatcctaatttgaaatgctgcttccaggagacctgacttagaaaattggacaaataaagttgatttttttaaatgtccagtaacatgaagatgctgaactttcctagtcatttagggggaaatcaccacaaatatatctggctgatcaggttgaaagttaaaagaaaaaaagatttataaagtgggtattttcaagatggtgtggagggagatacaatttgatgcaagtcttatacttttgatgtcaatttattcttcagaaataactggttaattataaagggtggatggataaggatattcactgcaacaatgtcttaaatgtgaaaatggaaacaacctaaatacccaataataacaggattaaataattcattgtacattaaaagaatactgtctataaagatgtctagaataagttgttcagttgaagttgtaaagctaaatacacaatacccataatgtgcacagaaataatcagaatgtcatgaaaccaggattattggtgatgtgttgcttcctttgttactcatttctgtattggcataatgagtattgggtgttcaagaggagggggaaggaagtatgacagatgttatggggaaaaagcaaagtacaacaggaagacaccttgggggaactaatagaatctaaggactcaaggatggcttcctggaggaaatacagctagaacaaaggggaggaatgagaagtgatgtgatggcgtggagtgggctgtagtgggaagaagagtcttccagggagctggcacagtatgtgaaaacagtaaagcaagtgcctggattttttaaggaactgaaaatttagttgagttgaaatttagagtttggctaggaaggttatgagagataagaataaagagttaacagcagccagattttaaggattttataagacatttttaggagtttttatttcatcctgagagaaatgtgaagccatcgaagggttgaaagaggagagtgagttgatcagcattgcattttagaaaaatccctctatctgcaacttgaaaaacattctggaggtaagcaagcctggaggccaggagcctaggagggctatttgatccagatgagaagtaatggtgacctgaactagggcagaggcacctaggattggaaaacatggacagatcacagcactacttatgtagtatacttggtaagacctggttgtttaaaagagaaggatgagggaaagaaggtcaaaaacaacttctaggactctccattggccagtgtggtgtgcccttcactgaagagcaaacacaaaatgaaagattgtgggcaaagagttgagtcagtgagaaggcaaggagagaaccttataaaaaaaatgactatgtgattaaaaacttaaaaatttcccccaacgtgtttatcttttccattagcagaaataactaagagttgtcttaattctaatgggatttattccatattgtctctcatgccctctacctagttattagtgcaaatatttatatgtggcaacataaaactttttaactctttattctcttctctcgtgtaccctcccagctctttaggggaggtggatttgaggcagataccataaagaaaagttggtcacatggtggtaacacgttgaagttatgccacatgagacatcagcactggcaagagaaatgtctgtgttgtagatgtttcacttggaagaaattgaaggaccctgagccttaaaagtctgacaaacttaagccaggacccctgtggggaaggtagaggggccaacaaacaagattgggagtcagagagataacaatgaaatccccaatgcctgtgggaggtggactccctggattagtactagacagaaaaggtacaaaaatatttcaaaccattctcacaactctatatgtgtctatgaccagataactggaagaccttctggttatggactatgcgtatacactctcccagatagttagaggcatatctaagaggttaacatatatgatcttatccaaaatgggtctcttggtgctagtgttttacatcagacttcactggctttcatgtatttccacaagtgccaaacatttctcatatccttgctgtattccatagagcagtgttcctgctacctggaacacttgattcttgaataactcctgtttacctttcagacaaaccctaaaggttaccacctcaaagaagtctttatagaagcctcatcatcttagacactctgtattgtttccttcatcgtatttacaacagacagatactgtgcacttactgcctcacttaacgacagggatacgttctgaaaggtgcatcattaggcggttttgttgtgtgaacatcacagagtgttacttacacaaacctaaatgatacagcctactaaacacctaggctatatgagcaatacagcctattgctcttaggcttcaaacttgtacgacatgtcactgtactgaatactgtaggcaactataacacagtggtaagtatattgtgtatctaaacaaacatagaaaaggtaatgcactgtactatgatgttacaacagctaggatgttgctatcaatagaaatttttcagcttcattttatttttatgggaccacctttgtatatgtggttcattgttggccgaaacaccattctgtggcacatgactatgtatttattcctcattattcctttaatattcgtctcttccaggagggcatgtcatggacaatctctttttcttaccacaggtcttaggacctggcctagcacctggccaagaactactggcatacctccttttattgtgcttcaatttattgtgctttgcaaatactgaattttttacaagttgaagatttgtggcacctctgtaaccagcaagtctattggtgccattttttcaacatcatgtgcctgtttcctgtctcgctcatgtcacattttggtaattttcacaatattaaaaactttttcattattattatatgtgttttgttggttagtgttctttgattttactattataactgttttaggtagccacaaattgcactcatatcggacagtgaacttaatccatgaatgttgtgtgtgttctgact

SEQ ID NO: 95275 - DNA, 14319 bp, Homo sapiens
ggttttgtgccagttcagttttgaagcaacggccctgcggtactgagggtcagagccgtctcccatctgctccctctcttcctcccactggcccccatggaagcagctgcccaagcttcttgagaaggtgagtgccggaactccaggacaggaagaagactctaagcttggtcttaaaagaccacaaagcggcctggcgcggtggctcacgcctgtaattccaacactttgggaggccgaggcgggctgatcacgaggtcaggagatcgagatcgtcctggctaacacggtgaaacctcgtctctactaaaaatacaaaaaattagccgggcgtggttgcaggcgcctgtagtcccagctactcgggaggctgaggcaggagaatggcctgaacccgggaggtggagcttgcagtgagcttgctggatcactccagcctgggcgacagagcgagcctccatctcaaaaacaaacaaacaaaaaacaccacaaagcatgagatccaacagcctgggcaacatggcgaggccttgtctctagaacaaaattttaaattaaaaaaattagccagacatagtggtgtgcttgagccgtagaggtcaaagctgcagtgagctgtgattatgccactgcattccagcctgggcaatagagtaagaccctgtctcaacaaacaaacaaacaaaaagccaaacaaacaaaaccccacgagatcctaaggttcccatggcctttcttcttgcactgggcccatgactctgcctcaggctgtgaccgggacatgaatggagaggaaggaaagggaaatggtaaagggggcaggattgtctccaagtacttccccaggtccaggggaagagggctggcaggtgaggaaaccagagaatgggaaacccaggctgaaccctgatgttgagcccgaacgctgatgcactgccgtctgtgtgcatagcacagtgaaaactgcaaagagatgtggttcctggcctccaggaattaacgatcaggtggaaagaaagttcattccacccagggatgcgttggagccagctagcacctttgagctgattgtgcacgtctctacacaatgacaccatgacgttgtgtcagtagtttcaaatccgccatgtggcagtattcacaccagagaaatcagcgaactccacaaatcagggctccctccactcccccagagctgaactttaaacatttacctgcatgctggtgactctgcctcactatagcacaaactgcttaaataaaggtggggcgggacatttggtcacagtcgggaagcagttgaaagtgtcatgggtttgagtctaaggtcaagctcttccgctgattgactatctgaccctgattatctccacctcagcctctgcctctctttaatgagactgatgctatctaccctagttagttacagagtggctgggaggcttaaatgagatcggtctgtgtggatactatgtaaattataatggattttatcaaggtaatagatgcagctttaaaacattcataaaattatgagaatgaggcctaccaaatcccagtttcataaggatacatatgataatgcatatttgtttgatttcccatttatttaataacacttattgacactacccatatgctagacgctgctagttgggcagtcttaagagaagatgtaaaaacactttgtagattacaaagctttttttttttttttttttttttttgagatggagtctcactctgtcgcccaggctggaatgcagaggcgtgatcttggctcactgcaacctctgtctccagggttcaagtgattctcctgcctcagcctcccaagtagctgggactacaggcatgcatcaccacacccagctaatttttgtagttttagtagagatggggtttcgccgtgttggccaggctggtctccaactcctgacctcaaatgatccgcctgcctgggcctcgcaaagtgctgggattacaggtgtgagccactgcacccggctgattacaaagttgttttttttttttggttttttttttttgagatggagtcttgctctgtcacccaggctgggtggagtgcactggcgcaatctcggctcactgcaagctccgcctcctgggttcatgccattctcctgcgtcagcctcccgagtagctagctgggactacgggcgcccaccaccacgcccggctaattttttttgcatttttagtagagacggggtttcaccgtggtctcgatctcctgacctcgtgacccgcccgcctcggcctcccatacaaagcttttatacaagtcttttgtaaagtagaaggcatcatgcaaggaaaaatgttgtttttctcagctttcttcatcttttccaatctggacacacattttcactgcaactaatattataccgatactttcattagactaaaatacctggcagcggtcacagacaatggtgtggaaaggaaaccaagacaagaaaacatccttgcaatatttggctgaggcaggagaatggcgtgaacccggggggcggagcctgcagtgacccgagatggcgctactgcactccagcctgggcgacagagcgagactccatctcaaaaaaaaaaaaaaaggccataataaaatttatacaaaattatttctatgtatgcctatatgaatagggaagaatatacataaagatattcacagtggctatctctaggtggtaagattattttaattagcctttcttgctcatatgtaatttttattttctctacaaaaattggctacgaaattttggagataaaaactgagaagtaaaagatcttcatgcagctatttattttgtagaattacaaatatggatatgaaaggagccttacaggtcatctggtttcataagatggggaaactgaggctgagggagatgggaaggaaataactgaggactttgagttttctctgaatttgcattctcttttttctctccaaatgtgtgtgcggagcttttgataattaatctaaacctgtatactctacaatgagattctcatctttcattatctttctgactttttgatgtatctgcttcctctggtatggtcatttgtctttgccttgtttctaatttttttttttttttttaacattcaactgactgcttggtttctcttttctttgaaagactcttgatgtaaataagccctttatccctatctggcctctttaattatatcttctcacgtttgctttctgctctctaccgactaatttctcagaaatttgcaagggtgaatcacaatgcctccaagccatgattcccagaatcagaaaattgctttttaaatttgaggtagactgaaacgtttttcatccacgtatagtatatgatcgaatacaccagcctttgctttctggacctcagcgtttacatctgccaggtggatgttttcccagcttgcatgatgactgcttcttgttgaaagcatcttggaaaatctgaagccctttccacctcaacagcacaggctgggctggtgtgctgggctcatccctgtaattccagctgtttgggggacaaaggcaggaggattacttgagtccaggagttcaagaccagactgggcaacacagtgagaccctatctgtgttaaaaataaattagtcgggcatggtggtacatggctgtaatttcagctacttatgaggcggaaagattgcttgagcccagaagttcgaagctgcagtgagctatgatcatggcactgcactccagcctgggcaacagagtgagatcctgtctcaaagcaaacaaaaacagcatgaggctgggtacagtggctcatgcctgtaatcccagcactttgggaagccgaggggggggcagatcacttgaggccaggagttcgagaccaacctggccaacatggtaaaaccctatttctactaaaaaatacaaaaattagccatgtgtggtggcacatgcctataatcccagctactcgggaggctgaggcatgagaatcacttgagcctgggaggcggaggttgcagtgagccgagatcatgccactgcacttcagcctgggcaacagagtgagactctgtctcaaaaacaaaaaacaaaacaaaaccaaaacagcaccagatacttgactgctagattgcacatgagcaaatggatttggggctagagattgcgaaagaagcctaagccaccttccaagatgtgaagtgttgggctgcacacagggaaagtccagagaggcagggtgaaacatcagaacaagtgactttgactcctgtttttgttgaagcctctctgtgacacacagttatccagcttggaacatctctgggtatagtttggctccttatctgtggcctcttcgaaaagtgtcaatcatgagggttgaaacacccgcctacatacacacacacttagtgaatgaattgacacaagcctccagattcttttttgagagtagaatagcactcactgtccaatagaaatatgatgcaggccccaaagctgagccatatatgcaatttaaagtttttagcagcttctttttttctttttttttgagacggagttttgctctgtcgcccaagctggagtgcagcagcacgatctcagccgatctcagctcactgcaatctccgcctcttgcacccaagcgattctcctgcctgagcctcccaagtagctggaatgacaagtgtgcaccaccatgccctgctaatttttgtatttttagtagagacagagtgttgccatgttggccaggcaggtctcgaactcctgacctcaggtaatcaccccgcctcggctcccaaagtgctgggattacaggcatgaaccactgcatctggccattagcagcctcatttaaaaaggtaaaaagaaatatgacaataattataataacataatcaatattttaaatgattgttgagggctgggcacggtggctcacgcctgtaatcccaacactttgggaggccgaggcgggtggatcacctgaggtcaggagttcaagaccagcccgaccaacatggagaaaccccatctcccctaaaaatgcaaaattagctggtcgtggtggtgcatgcctgtaatcccagctgctcaggaggctgaggcaggagaatcgcttgaacctgggagacagaggttgtggtgagccgggattgcgccattgcactccagcctgggcaacaagagtgaaagtccatttcagaaaaaaaaaaaaattgttggagtattttacattcttttgcacctactaagtcttcaaaacccagtatgccttttacactgagggcgcgtctccattccaactagccacagctgaagtggtcagcagccacatggggctggcggcctgcaggccggacagcaccagtccaggtgtatccagcgagttgctgaggatggcaggatggaaaggaggagtgtgaaatcgtgcctggaatgtccaagcggatttaatcttattggttaaagatgtccactaggtggcgatatatgcaaggaatgaaaatttactatgtggctgacattgttaatatatgcaattatttgtagatataattcagtatttccatcatccctgcaagatgagtaacaggatgttcactttgcggatgaggaaaatgaaccttaagcaacctaggcgtctggtgaaagggtttccagccagcaaccggaggaggcaggaatcatgccaggtgtgtctggtgccggagcccagaggcttcccagatccgcacacttcatgctcactcatctgccagccacacagaggtcctggatgtctggtgggcgatgagcaagcgacagagagtccgtgtgatgaggttgctcaggctgatgtgacaacagtgagaagaggcgtctcatctcatccctaaccagacggggttagggatggcgtcttggagcagccaaccggagagattgacatcgctgataaagaggtagattcacacgacctcatctttgtcagtgcacaaaatggctccctacagcccactggtgacccggctgcagaaagctctgggtgtgcggcaataccatgtggcctcagtcctgtgccaacgggccaagatggcgatgagccactttgagcccaatgagtacatccactatgacctgctagagaagaacattaacattgtttgcaaacgactgaactggcctctgaccctcttggagaagatcgtgtatggacacctggatgacccggccagccaggaaatcgagcagggcaagacacctgtggctgtggccggaccacgtggccatgctgcagttcatcagcagtgggctgcccaaggtggccatgccrtccaccatccactgtgaccatctgaaagaggcccagctcggaggcgagaaagacctgcgccaggccaaggacatcaaccaggaagtttataatttcctggcaactgcaggtgccaaatatggcgtggactgctggaggcttggatctggaatcattcattagattattctggaaaactatgcataccttagggttcttctgattggcactgactcccacacccccagtggtggcggcctggggggaatctgcattggagttgggggtgccgatgctgtggacatcatggctgagatcccctaggagatgaagtgccccaaggtgattggcatgaagctaacaggctccctctccaattggacctcaccctaagacgtgatcctgaaggtgtggcaggcatcctcaaagtgaaaggtggcacaggtgcaatcgtggaataccacaggcctggcatagactccatstcctgtgctggcatggcgacaatctgcaacatgggcgcagaaattggggccaccacttccgtgttcccttacaaccacaggatgaggaggtacctaagcaagacggccggacagacattgccaatctagctgatgaattccaggatcacttggtgcctgaccctggctgccattatgaccaactaattgaaattaacctcagtgagctgaagccgcacatcaatgggcccttcacccccgaccaggctcacccygtggcagaagtgggcaaggtggcagagaaggaaggatggcctctggacatccgagtaggtctgactggtacctgcaacagttaaagctatgaagatcccgggcgctcagcagctgtggccaagcaggcactggcccatgacttcaagtgcaagtcccacttcaccatcactccaggctcygagcagatccacgccaccattgagcrggacagctaygcacagattttgaggaatgtgggtggcatcgtcctggccaatgcttgtggcccctgcattggccgctgggacacgaaggacatcaagaaggggaagaagtacacaatcgtcacctcctacaacaggaacttcacgggctgcaatgatgcgaaycctgagacccatgtcttcgtcacrtccccagagattgtcacagccctggccattgtgggaatcctcaagttcaacccagagaccaactacctgatgggcaaagataggaagaagttcaagctagaggctctggatgcagacgacyttccccaagaggagtttgacccagggcaggacccctaccagcaccccccacaggacagcagtggccagcacgtggatgtgagccccactagccagcgcctgcagctcctggaggcttttgacaagtgggatagcaaggacctggaggaccygcagatactcatcaaggtcaaagggaagtgtactactgaccacatctcggctgctggcccctggctcaagttttgtgggcacttggacaacatctccaacaacctgctcactggtgccatcaacattgaaaacagccaggccaactccgtgtgcagtgccvtcacccaggagtttggccccgtccctgacactgcccgctactacaagaaacatggcatcaggtgggtggtgatcggggacgagaactcgagccgggagcacgcagtgctggagcctccccacctctggggccrggccatcatcaccaagagctttgccaggatccacaagaccaacccgaagaagcagggcctgctgcccctgacttttgctgacccaggcgactacaacaaggttcaccctgtggacaagctgactattcagggcctgaaggacttcgcccctgacaagcccctgaagtgcatcatcaagcaccccaatgggacccaggagaccatcctcctgaaccacaccttcaatgagatgcggatcaagtggttctgtgccggcagtgccctcaacagaatgaaggagctgcagcagtgagggcagtgcctcccaacacacccccaacctcgccccccagagctggcgtcatgttcaagttcagctccacatgcgccatcagcagatccgatccatccagccatgggttctgattccaagatggtgtgaccagacatgcttcctgctccccgctcagcccacagagtgactgtggttgggggaggttcttaaaataactttttagcccctgccttcctatttttagtgtttggttccaatcttaagcagctccatgcaactgtatttatttttattgacaagactcccatctaaagtttttcccctgcctgaccattttattggtggctgaaggattctagagaacctgttgttcttgtaaggaaaacaagaagccaaaaaaaaaaaaaaaattaaaaaggcagattcagcaagctgctgtggggaggtgttaagggcagctgtttgggggatcgcacrtaacaccacatggctagaatagggtccagggtccagggtatgctgtggggtgaacatgtggggtgagagcagtagacatgtctgcagtgggcacagcaccgagggtattctacctccagagcagtgggatttaagcaggtgattgatatgaagagttttactacttagagggctccagaccccagatgcagagcgttgagcaaatgaggcaccctttgcaaatttgaatgacaagtttaaccacacgcagttaccctgcagcgtaggacctgtcctagccaacagaacagagcaagagttctggaaggtgtttgatgtttgcaccatatgctgcggagtcccacaaatctaaactcaagctctggctttgccattcactagtaccataacttccggcaacccttaatttctgtatcataaagtaggaataatgctgggatcagtgggttgagctgctgtgaggattaaatgaagcattgcttgcaaggtcatgttaccaaagcagtcccacagtggagtgttcaggaccacgagtggatggcggcaccagactctgaaattctcctccggtcccctcctgtgtcgcacgtacgtcagcacgtggccgggcgtggatacctgccycatgagccacgtgttcattcaggaactattccgaccttacacaccaggccctgggcagggaaagatgctgccttcatggagctgatagcctggtcggggagataaatggtagttaaatgacacaatgaatatataaatagaaccatgacaagtgtttcagaggggaaccctgtgttctaattggggaggtagagaaatgcttgcttggtgtgttagtttcccagcactgtcatgacaaagtaccacaaactgaggggcttgaaacaacaggattttattctcacagttctggaggctggaagatcgagattgaggttaggcagggccgtgcaccctctggaggccctgggggaggctccttcccggccctttcccagcatctggcattgctggcagcccttgggattccttggcttgtagatgtatcactccagtctctgcctttggtgtcacaggaacttctcccctctatctctgtctatgtccaaacatatctttcctttatacaaacaccagtcattggatgtagggttcctactccagcatgacctcatcttaccttgattatatctgcaaagaccccatttccaaataaggtcactttcacagctacagcggggggcagggttgggacttcaaaatatcttttgggggaacacaaaagatatattgatatatatatttcccctacatcatttggggaagtgatatttgagccaagatctgcagcttgagaaaatcttatccagtcaaagaggtcaggaagcaggttctgggcaggatgtggcctgtgcgaaggccctggggcaggagggagcacagcacctacaagggactgagcaagggcagaggaagggatgggctttgggcactgattatctttaggagtgaaagagttgctaggtattattattgttgtttctatataaaggatcacacaggacaggtctcagtgccccgtcctgatgtgctgtccaagctgctcaatctgttttcctgctgtatgcctcacacccagttcttttcccatcacgtatcattcagagcaatgtgcaaccgcaaatatttctaaatggggagaactcaggcagatggcgcggcatgccttcagctcagtgcacagactctgccccagacaacccacctgtgtgtccacaytccccactgactgagcacctcctgagggtggggggcatatcatgttaatatttgtacatccaacatttcatgaaatgttatgaacatcagaggagttttataagtgtttgctaaatgttactgacttagattttcagggtgtggccaattccatccgaagggcgttatttatcttgtcactaaccgtatcctagagaagttattaagcatccgtctaattcaaaggaaaatgggtagatggtgggaggattagagagtggacgccatgttggaatgcaggggtaggggaaagccagcttgctaatcagaatgtcagtgaaggctgggagctggggctcacgcctgtcatcccagcactttgggaggctgaggcgggaggatcagttgaagccaggactagcctgggggaacacaatgagactgtgtctctacaaaaaaaaaaaaaaaattaaatacattaaccaggtgtggtggcacatgcctgtaatcccagcactttgggaagctaaggtgggcagattgcttgagcccaggagttcaagaccaacctgggcaatatgacaaaaccccatctctacaaaaaatataaaaattagccaggtatgatggtgcacacctgcagcccaagttactcaggaaggtgaggtgggaagatcacctgagcccagggaggtcgaggctacagtgagccgtgatggtgccactgcactccattctgggtgtcaaagtgagatcatgtctctaaataaataaataaataattgttctatagaattttattgatttaagaaaatgttcagaatagatttataagtaaaaaatttaaaaggtatatatacataggccgggtgtggtggctcactttgggaggcctttgggaggccaaggtacgtggatcacctgagatcgggagtttgagaccagtctaaccaacatggagaaaccccgtctctactaaaaatacaaaaattagccaggtgtggtggtgggtgcctgtaatcccagctactcgggaggctgaggcaggagaatcacttgaacctgggagatggaggttgcagtgagccaagattgtgccattgcattccagcctgggcaacaagagcagaactccatctcagagaaaaaaaaaaaaggcatatatacgtgtgtgttgatttgtgtatagaataagacatgcatttaaaaaaaaaaaggtaggattgcaagtggggttttttctttttcttttctttttctttctttttttttttttttggagacggagtttcgctcttgtttccccggctggagtgcaatggcgtgatcttggctcagcacaaccaccgcctcttgggttcaagcgattctcctgcctcggcctcccaagtagctgggattacaggcatgtgccaccaggtctggttaatttttgtatttttagttgagacggggtttctccatgttggtcaggctggtctcgaactcccaaccttaggtgatctgcccaccttggcctcccaaagtgctaggattacaggtgtgagccaccgcacccagctccggtttttttctgtttctgaattttcctatgtgtgctgcatggaaccattataattaattttaaaaagcaaatatatttcatttgtctcttgaaaacttaaaacaactctttataagaattttacatgtgcaagatggtatactatatagtcatttacaataatgttttaaaagaatattccataatatgagaaaatattcatgctatatttagtggaaggaataggttatgtaaaatatactgtttttgtttgtttgtttgtttgagatggagttttgctcttgttgcccaggctggagtgcaatggtgtcatctcggctctctgcaacctctgcttcccaggttcaagcgattcttctgcctcagcctcctgagtagctgggattacaggcatgcactaccacacctggctaatgttttgtatttagtagagatggggtttcaccatattggtcaggctggtctcgaagtcctgacctcaggtgatccacccacctcagcctccctaagtgctgggattgcaggcataatccaccacacttggccaatataccataatttttaaaagggcatttacagaaagactatcagtaagtctggtataatacatataaactgtggggttaccaggaatgcatatctgcttctttatacttttctgtattttccagatttttaattatgaatatgaatatgagtatgaagctataataagaaaagttatttgaaagtcacattatcaaattgttcaggttatcatggccaggcagggtggctcatgcctgtaatcccaacacttttcgaggccgaggtgggcaaatcgcttgagcccaggggctcgataccagcctgagcaacatggcaaaaccttgtctctacaaaaactataaaaattagccagatatgatggtgcacacctgtgattccagctactagggaggctgcagtgggaggattgcttgagcccaggaggcagagtttgcagtgagtcatgatttcaccactgcactccagcctgggcaaaagagcaggaccctgtctcaaaaaagaaaaaaaaagtgacaagttgagagacaatggttattttttatttttgagatggagtctcgctctgtcactcaggctggagtgcagtggcaccatcttggctcactgcaacctccatctcccgggttcaagtgattcttctgcttcagcctcccgagtagctgggacttcaggcacgagccacctcgcccgggtaatttttgtatttttagtagagacggggtttcaccatattggccaggctggtctcaaactcctagacctcatgatccgcccacctcggcctcccaaagtgccgggattacaggtgtgagccattgcgcctggccaacaatgattatttttaattttattccatggttttctatattttccaaattcttctcaataacataaaaatgatttcatattgtattaattactacaatgcaacattgtaaggtcgggggacgctgatggtggtctacctcctgatcctctagtatgcagtatttcacccagggttttcacaagcagtttctcatttggtcctcagaggaccctatacctaggtgaggatggcggtgctgcttctgagaagtcgctgcctccccttctccctttagcctccctggcaaaataagacacttcgattgcggggccacagtcagttctgactctgatatcttacgacacctatcagggatcagcctggacctgttacctgagcggggtgtggcctcctttcctctgcgctttccccacacctgaaactcctgatcattcagccccttacctctcccaagctttcagcacaagctctcctccttagccttctaaataaataaacaacacctgcacagaacactgccattttctgtaagcttttcttcccctttaaaaattgcagtaaaatatacataagacaaaatgtatcatttaaatcattttaagtgtacaattcagtggggygatatacataaggcaaaatgtattatttaaatcattttaagtgtaaaatccagtgcctttaagtcccttcacgatgtcgttgcaactgtcaccaccatccagctccggaacttcttaatcatccgtgggtaagcttttgaagcttttgaatccatagtctcataacattttattgccgtcctcatcgtcaggtgaggaaactgaggctttcttccttac

SEQ ID NO: 95276 - DNA, 74499 bp, Homo sapiens
  misc_feature (1)...(74499): n = A,T,C or G
ccaaggcaggcagatcacctaaggtcaggagtttgagaccagcctgaccaacatggtgaaaccccgtctctactaaaaatacaaaaattaactgggtgtggtggtgggtgcctgtaatcccagctacttgggaggctgaggccagcagaagcgcttgaacccaggaggcggaggttagagtgagccaagatagtgacattgtactccagcctgtgcgacaagagtgaaattctgtctcaaaagcaaaacaaaacaaaacaaaacaaaaacaacaaaatattaaatgactgcaggggttgggcatggtggcttacacctgtaatccctgcactttgggaggctgaggcaggcggatcacctgaggtcaggagtttgagagcagcttggccaacatggtgaaaacctgtctctactaaaaataaaaaatttgacaggcatggtggtgggcacctgtaatcccagctactcgggaggctgaggcaggaggattgcttgaacccaggaggcgtaaattgcagtgtgccaagagatcatgccactgcactccagcctggacaacagagcgagagtctgtctcaataaaacagacaaacaaaaaactcccaaaacattaaatgactgaaggtaggctattttggccataataagttaattcttttgaactgtgtcaagtaatagttcttttatccttttaataaagatgcacgtgtccacaagaaagctatctctcgagattctcaggagtaacactgcgtagaattcaaggaagatctagtattgtggatattgttttgtctgttcagtagccaagtttacgaactttctctctagggttgagttgcccagctggtatgcacaatacctaaggtgccctgtgtgtctgggttacataggtgccaagactgatttccctcaaccttcagggggctgcctgggacccacacagcttaagcctcaagctggtgaaggtggcctctttttttctttttttcttgctctgtcgctcaggatggagtgcggtggtgtgatctcggctcactgcaacctccgtctcccgggttcaagcaattctcctgcctcagcctccctagtagctgggactacaggtgtgcgccaccatgcccagctaattttttatatttctggtagagatggggtttcaccatattggccaggctggtcttgaactcctgatctcgtgatccacccgccttggtctcccaaagtgctgggattacaggcatgaaccattgcgcccggcccagcctcttctatttaccctggtgaatgcttaagtatcatcccttaccatggaaggcactgggcaccatgttctgtgactggactctatcaatctttcatctttgcttctccttgtctgccctcccaccttccacccccatagttttctgaacaaattctcatttctgttgggctggcttctttttccagtcggcctaggatttgctggccttgagtccagtcagtggctattgtttggcagctcaggttccctgtaaggcaaaaccagcaatctactgaataaacctagcattaagctgagaaaaagaatgaataaagctaacaccatccattaattttctcgttttgacttaccaactgatgacaagcaaggactagatagtagtcgggccttcactttatgtaccagtttttcccctgtcagtgtaccatgtagtacactttatatagtttcttggcacagatgtttaaggcaaaattggtaaagaaagtttggaagatggattacatatatttatttctaaaaaatgaaaaaaatacatgaagaaaacacttaccctgataggcaaaataatgtgtatgaagataagagctggtgtggtttgtagtaagggcactgaagtaggctgataacatctgggctttcttcccagctctgctacctttatactgtgtgacctcaggcccggtattttacctcccgagctttggcttcctcatctcagaaggacataataatacttgccataccaaccccaaagggatgttgtgaaaatgatatcaaagtggttggaatgcttgaaaatgctaggacatttgcatgatgtgaaagaatgatcttggatctaagatcaaagagttcaggcactttgagattagtaagaaatttgggtcaaatgctgaagtagggctgctaccactacagtggttttcttttaaaattttaactacaatacagaattatcatacagttctatattatttcatatatatagaattattaaaatttggctttaaagtgatcatatttgttctgaaatgtaagacatttaaaatttcttttatataatctaaataagatacagggaccaatatcttttttctcaccagagatctgatcatattcacaatayaaatttttgagaagtatctgtaccacaacattttggaattacatatgtgtgtgtgtatatatatatatgtatatatatatacactcaattatatgtatataaatattccattttatgaatcatgccaatgtcttttatatgatctacaattatataaatacaaattcaattgtctaagcataattcatcaacccaataattttctttagctgagtctcagatgctgagactatgcatttaaacagatataattactatttttaatcagtgattgtaacatgaagatctgaatctttagctaccataaaagagattctatacactattttctttcatttcttccccccaattcactgaaaaaaattagatatttttattttaccatgctcacaagcaaattcaaaacacagtgtatattgttcatcctcactcagtcagcacagactaagtaaaatatcatccatctcattaacaagtacatttttcttttttcaattgcaatctgtgtatacttcttattaatacaactagaaaaccattaattatgatttaatttattcagtttgatacccaaatatttaagagcacggtgtccctagtggacagaaaataataaaaggaatacttggtggtaataaacttagaacaaagccattaaataaaatttatttctgtcttactgttgtaagttatgtctcactattacaggattaagatctttttaatggcattaaaaaatagacttttagatttctgcaaggtcattcctctgttatggggcttacttggctcctgaggaaatatcagttgatattgtgggtttggaaaggctcagttagcatttcctgtgcactgagtatttaatctatctctgttttaaacatgagctgagaccctgaggcatccctcagactatgagagacagacttaatgggtgacccactaggaaatttggtgtttaagcagaaagagacaaccatcatttgttactgtggacagagagtgactgcaaggagagatttctaaaaatatattttacaaatactcgaatggtgcttaccatgtaccagcctctcccatgctctttacaggcattaattcatttaatttaatcctcacaacaatggctgcaccgactaggcttgttttctggtacaacagataaaagtctactcctggggagagctaatcagtcttaacaagtaccgtgggggacacttgccgaacaagagaaatcaagagatagggttaaaattaggggagaaaccgatggcagtcatctatgccagctaggttcatctgtacagtcttcagatttcttatagatgaatcatcaaattctataatgttactacttctctctcagtttatagtaaactttcctttgaaaaagccaaccttgcctgagaagaatggtctaccactaggtcagcaaaggtatggaactctcttttgactagtggtatggtggtattagctttgtaaacaaccagtctaactgatgcaaataaagataaatgaacagtgggattggagaggggaaaatcacaatttttgcttcctcagcattcatgacttctttggcttgcatagattttgtttttctttattttacaaatgagtttccttttaatgttgttccactttgcatttcaaatttcccttaagcatctaaaaatgttacaaaatagtgtcattacctttcaaattaaacatcaaattagccagagaagttgagttgtgagtactccaacaagcaaaatattaaaaaatgaatttcaacttggtgatcccacctagtgaactaatgggatataaggaacctcttacgtcccagacaccatgcttagcattatgcacagttatccatttaatctcacagccttgcaagggggtattatatccactgtttgagggcggagaaaacaggctcacacaaagtagtagcttccaggggtctcacagttaatattaatgaaaggcttgggcttatacataggtgtttcaggttccacattgcaaagcattatctcagggacgatctatggcatgcgcatcccgataaaaacgtaccaaatttattggctatcaactacagttccatctggaaatactcagcaaataatggcagtaaggcatcccgccacttcctgcatgattagttgaaaaagaaacacctgcgcacacacatttgaacaatgtgatacagctaaggacctggacagtcagctagcaggaagaaacatttgaacgaagggtagaccacggcctaggaggtggatgaagacacccgtccgtttgcctactgaagcaagatggggctgaggcgctcaagggcctattggctgcccagaagcctttgcagcgccgcctgaatacagcgaggatgacccagggttcaccttcagcgttgaaggcaagtcctggtataagggacgcacataggtccgcgccacatcctgacactgtttccacaggaagtgcgggataggaggggggattcattaatccaggtcggaaatacaccttgttcctcgaggattttggaaggaaattccacccgcgaagtccccttttggagatgcccttttcctttcaggtacagcatccttcattatgtacccccagggtacaatgtatccggggctcgcaacgcgtccctcaacccccagcagcgcggtcaccgcggggtccccgggcgggcgggggcggcggtgacgcaggaggcggtggggccccggtgcggcgggcgcggggagggggctgctgggcgcgggcctatcaggacgcgcggtgtttcgggcgcggggagggcggggacctccaggtttcctcggggcccggcgcagcgccgcctgccgagttccgagcgagcgcgcgaagcgcgcaggggtctcgagacgttcccgccggtcccggttttcctccgcggctcccccgccccttcacgtccgcctctttctccaaccagacgcggctccgacggcgctcggcctctgctcttccggctccccggctctgcccgcagcgcgcgtcgcccggttgctcttcgcctggtgtccgcgggcccggcgggggcgcctcaccccgggcgcgcggcggtaatgccgctgccgcccttgcggccaggcaggcagctggcggcggccggagtcggagcgcgttcgtcgctggccgggacgccgccctggcctgtgctcagctcccgcggcggccgcggggcgccggggcccggcgcggcatgaggaggcggctcggtgcaggcgagcgcccagctcctcggccccgagggcccccgcgggcccccgcgcgtggcgcgcgctggttgcggccccggcgcccacgctagccccgcgcaggcaggagacgccgcggcccggagtaggaggcggcgcagggcctgccgagcggacgcgggcggcccggaccttaagcacggggcttcgcggcgggaccccgccgggcgcgggcagcggagccgggcgtgctgcagttagctgcccctctccgcaggggcgccgcggcgcgcagcctgcgcctcctcccacctgcagcccctcctcccgccgctgcttggcggagaaaacgctcctcctcgcccttccccggctttcttccgtcctgccgtccccgggcccctagcccccagtcccctctcccccctccacctcttgtccctcggcctccgcgcctcccctcccccgactctctggcctcccattcattccgtccgctccctcccatttcctcttttccgctcgggccctctccccagagcctccccgcgcggaccccgctgcagtctcggggttctcagcacatttatggaagtttagggcctggacagtggccccgagtccggcctgagagcgcagcctgggctgctggcagggaagaggaagatgtctgtgctcaggcggatgatgcgggtttccaatcgctctctcctcgccttcatcttcttcttctccctctcttcgtcctgtctgtacttcrtctatgtggccccaggcatcggtaagcaccgagacacaccctcgcttcccctggtcacaccacagccagcgcaggctgttatccgatgttacttctgggatttggaagctgttyaaacaggggcccgcagaaaagcgttttgttttaaatgttatttcagacgtgtcaaactgcttcagggcatggctttggtatgtgagttttgttaatgcatgcattttgttaatgcatgtttgttaataacgtaaaagattgcattaaatagacrtagcaaaattagtgtgatggcccgggatgccctagtcgctttcttgagtgttcatgacagctttatccatttaatgttaagtctttaagcctaaactgagtgcttaatcgtagttttattcaaacactctcgggtataataactggttgtaaaaatatggaggagccagcagcagggaatgtgattgagtccaacaatgtgtgttttctagggtcctaggtcgcttttttagaatggggtcagtggaccccattctttttgtgccatacttggggaattttaaggcgatgagttgtcttgtaaaaacaatgctccattattttagtctgcttgggtgttattttcaagggtacgttgcctttgctacctgttaggatgacttctgagaaaatagtgattaaaataaccgttatctaagggaacttgtagtttaaaatgttaaccggtttatcattttttggcctttggtgcaaaatacacttttgtaaaactgcttgaattaacttctttattaaatatccgaattcctcgtcccccatttgttgaaaaggagccaatgcggcgttaattctagtgaatgagaattatgaacttcacatgcatattaaaatatgtcatatttccaaaacttttctgagtttttcctggctattacgtatttaatgttcaattacttagtaacagtgagcatctcctctcatttctccttacacacwgtggtcgtttgagccagtgctctttgttccgagttagctaaaaatgtaatgccccttacagagtgaaaacacctgcagaattttcagatggaatgatcagggcattgtcttgagtgtagtagattattgcagtgaattgcagcagggaaggaagatggaaacctaatccagactgcttcatttcttaaaattactatgagactttttctttaataattaatttttggattcagtgaggtgtataaactcagatgatgatgtttaagaagaaatgcattgtgaaacgttgacgtatcccaaaatagaagttttagggtaaagtttgaagaatattttaacattattgcagttttcctttaggccagaaaaaacaaaaaacctcacaaaaacctaccccttgaagcctatagtacaaatgacagtggtagcttagtggatttgatattatctagatactcaacaagagctttctttattttttgccattttggagtcttataaattaactcttcattctatagcaatttttactttctcatgtaactctttaaaagtttggacatctttggggtatgtttttttactaggaatttaactttgaaagattttggagaaagtttttttcacacttacataacaattttcccactttcttagtattatgagtaacatgttaaagttatattactcaaaaagctaaccaaaggaaatcagaattctagtcatccctttttttttaaagttagtgcgtcagtatattatttgtagattcttaattcaacttgtgtgaaacactaataaattttccttatttgaatgcttaatgtttgccatagaacggtcactgatataatgtaaaaatgttggcacgtgtcttgtaggcarttagattgatgtggcttaacctactctgtttttgtaggtcttataaatgataataagttattaaaaccagttagaagagtgcaaaccaaaaacttacaaaatgctgtgaaattgtcaagctgaatctgtttccaaaaccctgtaccatttagccaaaaaaagcctcctttttaatcttttgtatctttaagtattgggaagcagttttccaaaattcagattttygcttgaaagtttgaattttatcattggcaacaaatactgtcagtttttcttgaagtgtcaggctcactttgctcattttcgagaaaatgtaggtcagatgcacaagtttaaccatagtttttcagttgttctttcaagtaaaaatgatgttccatgaaaaatgtggcttgttgagtccatactgcagcaatcaatcaattgcacaagtgcttcagatttcttatttatgagacatatccagaagtaattaggttcttataactagtttttattcgatgtatgtrgatttttcttgaaataataacttcaagaaaataattcatattttagcctgaattacatcttggggcaaaatgtgtttatgactaaaatgtatgttgtaagtactttttatgtgccctaaaaagcgtttyaaatctcctctgttaagaaattcctattaatcctaccatatcaacctgtttggtaaactttaattctctttccctacttgttttctgtcctgagccctgtgtatgtcatgggctttcttcccaggtagatcttctgtcattttagttcctcttctttgccatcttgagcagatacatcacacagttgtaggcagcgtaatctgtttagtttccagtgttttcagatgttcctctgaaatagtctatttctggactatttgggtcaactacagtgagttccatagaactcaaagctcattattttcaaggaaccatttttcttgaagtgtctaatgcatacaggaaacacagggatagtctttacattataaaccttagtactcagggaaactggatggcagacacctgccccatcaccacaccataggaagtccatggacagattgctgtagcccacccctagaggccagagccataaattatttcttattctgtgtctacctttgtgcatgattgcaaagatgagtgcagtttctctccaaggttttgacttggctggattgagaacagaattgcatttaataggaaacctttattaatataacttccaatataacgtagtcattttcttgctgtcatatcaaagatgagctgacttacaagttcattcaacaataggagttgtgcacccaagagaggctggacattgtttgaggtatggaagatagatgactaaggctcattttcttccgtcatagtacaatgggctgagccccataaaactgctgtagtaaatccttggaaggcatgtggtgggaagtgagggctggttaaggatttccagaggagaaagtggttgaaatgtaatggatgagatttatctggactgagcaaagggatcctagtcagagggaacagcatgagcaaagcttctagaaaatgggagtagctccatccagctactgcttagggcttggagtggcacatgggccaggttttgaaaggtctctggggctccagtgtccagccatggtgttcagatgcttgaggtctctaaaattcctggcagagagagactggtctttgttcatacagctttatcaaagcttctgtgattacaaaataaattgatagtgcctgtaatcagtggggctatataatgggaggagattacataacttccctgggagtggggatttcactgtccatttgactcaccagaagccctgacctttcctagacacactgacgggctgttttgctctctgggtagaggtgaaatctggttgggccactttggtctgacttcctctgggcccttggaggaattatctggctgagtgctttgttatttgggcctccctggggtgtgtgccctgctggaaatggtggagctgatggcgatgggtagtcaaagtgtggggtctatgtgcaagcatgtatgttgtgggagaggtatcttaggtcctttcctcagagtccctctggcattttggctggggttcttcctgggctagcacagaaggtagctagttaaccctgcagctttcttatcatagccctttagcctcctggccctggcaagtgggcctggctgtgttctttggagctgttaatagtctgctttgtttcaaaggtctttcagttttattcacccagtgctctgatctgcatggcccatttcaggagttcggatttggtatccgaatatcatggagggccatggtattgggcatctcttttttctgggcctcccttactggccacatgtcccatgctttttttgtcctgtgagtaacaggaaatgtcagaagtcttgaaagcgatgcagtccattgtcttagagtgacccttctagcatgaaggatgggttatagggggcaatggccaatagaagattaraactgtcgaggttggtagttcatcagggcagagttgaatggatgggaatagtaggtttgaagaaacaggaasagctttaacatgaggtttggattctagcttagacattcaggtagctattaatagggagtatagaaagtcacgtctttggggggctattttgcttttagagaaattgagttgggatccctgtgtgatatccaggaagaattagtaggtaggcagatgaaagtaagggcgtgctgcccaggagagagatttgattgtcttcatcatgtaggtgaatggtatttatttatcctccaacacatctgagtaataaaactcactccttcaactggaagtgactcactgtgtgacttcctctgaaacatggaatcacgggttaaattggaatacagaggaagaccaagtatagtttgaaagtatccgatgggatttgctaccctccttctcactccctagctttgttacaagagtcattgggtccattccacactcaagagatgagagatgagttagagattgtttccacagtcarattgccattcctaagtagcatatgtgactcagctatatctcttcagtgtaaactaatccaaatcccatggccttgtgggaaattaggcaatattgaagggaaacttgattcattgaaatctggcaatgctaactgctatttttcaccttagccttccttttacaaatacatttgaagtctgttaaacaatgtggcagagtgaggcagaggtgtgtttttttctgcagcagtgcttatcattactgcctttaatgtttattaaagataaaaatagccatgtctgtgattactttcagaagagaaacttctcacctaggtttgtagtgtctgtgtgtaataggtattccaaacactacgtgtaatttggttgggactaaaatgcattttccttttgaggcagtgtggtacacagtagttaatttcctaacccgtcctgtggaaagcctgtttctcacaggttgtcctgcagggcttctcagggcacttgtccttctgggcctcatctctgatggttctagctgtggcttttcctctcaccctcagagcccttgcgtttgcccccctgtccaagggcccaaggccaggggaaacttgggcatagaagcattggtttctggagccagagctatgagcagagcagccccaagagcaaaatcccaaagagagcccaccgcgttgtccatatttggagatccatgtcttccctgccacacccctgaccccttgccagtagggctagccttgtctgtgaaatgagagaaggaaggacaggctctggaagatggccacttgccgaaagtgtcacacatcattgttggaagagctgaaatgtacaccttaggattcctgactcattctactgtgcccgagttgaaggaactaattatttttgccctggacaatggaagattttggggaaatacaagctctcttttcttcagtttgaaggaatactgtatagacgagcgatgaaattttttggatagcctaagttagcagtgagggtaattacaatgaggcagagttgaggcttattgaaaagagagagagaggaaaaaaaaagaccagtcttctaactgacctgcaatcagtgaaataagtggccttataagtgctcctttccttacacattgtgaggtgagggtagatgaccgcctcttaaagctgtgattaccctggagagggtgctttgtttgggatactggacagacctcttggattcccttaaacactgtyactcagtgctgtgtttatactgtgtgcttagactccgcagcaccctggcttaccttgcaaaagggcagacctgctcctctacctgtccgccacccacactgtcttttgtgactccttttccctttcaagcctgcctttcatgtttgtcttaagtagaaatgtggaggtaggaggggaggctgaggtgagayatgtgtgaggagtgatttttctagagcttgggtttcctaggtcgccattgggagctcctcagacctgtatgtttgcaacattctttttctagtccattttcttggccgccttggaccaagctggcttttgtcaccactgcctgagcctgcrgtttgccagcctaagctggctgtccccacctctttcccttcctcttttctcctttccccttgtccctctgaatctgtttcgtgttttctttttaattcctgaaggacacggtgatttaatatttaaaagatgttttcattcaaattctgccttttgtcaggataataaagagaataatatacaagtaatacagtgattcaggttgaagatcgattcaagtgaagattgagagtaggttttctgaggatacccataatgcctttaacatgcctttggaaaattaagcatttactccagttataatgagatatttttacctcatatcttgggcccactggaaactttcaggtggcactcaattctgtttttcttcagcatttacatcctgtattaggccagtttgatttgctatgtttcatggttagactgcctgtggacataattgtttttggttttagcaaaatttagctgagtttggtttaagatacagcaatacccccttctcagttgaaataggagagttagcttaaaggatgtttatgtcagtaattatatttttggctgtgaagcacagcaaaatgtttaggaaartatacttagtaatttcaaatcttaatgttttattttttttcctccagaagtgtagtatggctttttgcttgcatctttgtttttatgtttaattacttgaattagtgaaagtctttggcttcaccaaattgttgtgttatgtgttcattaaggatgaaacacagatactcttatgtccaaatgaattgtggtatattcaaaagctatgtaaaagaagatatatttaatataagttaaactgatttggaaggaagggtctactgttttacttgttacaaatgttatgtgtggagaattactacaagaaatagttttcaaatatgaatgtgcttaaggtttatttaaggtgatatgctttaataagcttatttcccaggtcttatgggagattctgattctgattaatttttaacacgtacccagatgtttctgcacactgggagcgatgtttctgaaaaataccccaaatggtggggaaaaaatagtgctacatacttttctaaattgattatcttacatcatttgatatttcatagaactaatcttacttactgaaaacctgattaacttgtttataacatcatgttttactggcaatagagatggctgtcatggtgaagaatcttttccttcagaagagaaatggacggatacattattcataccaaccaggatcatgtgttcctttatgagtctgcagtgactaggtgattgggtcctaggtcatcctaaatttgttatttagtgtttttaattattagagacattgtaatttacttaagatcaataaaacttattaaactggatagcattataggttactcagtggaagtaatttcaaagcatttcctagcatttggctagaaaagtcatttttataatatctttacagtggtatatttaagtagctatatgaagtttgttactatgacatgatatcttgattgaatactatggcctgtttttatatatttgaggcaagtgttaatatgattttactgaaatcttgttacgtgtattgccttcctgataattaagttaattgctcagaaattatgacttytaattatagtgcaattttcagtttgactcataggaagagaaattggacattattttcatttgaatcaagagaccaaaggtagagaattaaaaggtgccttgtttactgatttgaaaatatgctttggaagtctttgaaattcatttcctacccagttcccttctctgattctcattttaggctcattttcctttcatgaatactaagttggaattctgaaaggtattttaattgtgaaaacacaagtaaattggaggtgattataaaacatattcaaatagttcacattttacttcattttgatagacttcttatatactgtacacttatatactctgacatcactaattttcaacaattttataatgtttcctgggcctgcttatttatggcttggtcttttagtctgtaatgtcattaagttagtttcctgattagatttttaagatctgtttaatttcctgcattcttccttccttgatttcttcatttcctcctgattccactttccccagtgtggttcataactctcttagggttcctgtcatgctttaaaaaagctatatagttattattttaagtgaattacacagtgcattagcagatgacaaggctgatagttatcttttgttagatagtgttttcatatcactaggttcagagtctactttttgaattatcaactagggttaaagtaggctgaactaatgatctggttgttggaaaagtccttctgatgttttagacagtttgtgcctttgcrggatcttggttctttacagaggaagccagatggccccttaacttttggcattgcttggtaaacggcagacactcaataaacatgtggataaacntgtttccaccctgaacatttttagtaagatcattggaaaagtcagttttcatttaaaaatgtttaaccttgatcagtattcaaacacaaagattctccagaaataacttaaaattgttaaactgcagagtggaaattgtaaagacaccttttacaaagaatttcttgtcagtttttagtatttgcatctgcaaagcttgagttgttagctaagatctgaaatagatctcctgtatgtgatcattgtatttgttgtttgataaagtggggctctgaacacagaattcttgcagactctgtcagcttataacttgaaaagtagaggtaaggatattatatgttagtaataatttgcactgcagatttccttgagttcatacatggttttgaattattgtcaccatggtcaaatagtactttgacataaaagaatttttttttttttaaacagcctggcacatccttgacatttgttattttttgtttttaatccaagtaataccttccttagtcctaggtgtagtatgaataatatttcatatataatctggcctaactttggggtttacaccattgttattgaagataacatattttcctttacccacatggatgagtaattcttggggatttattgaacaagaggctagatgtggaaagaagaaaaattttcagcatcagaaacagatacttagaagattatcataaattcttagaaattcttagaaagagatacctgattcacatatctgtagttattattgagtggtgcattaagattttcacttttgtccatattatttccagtgttccgtagataatatgggaaatcattttctcttctgtaacttttaaggatctcttctggctttctcctcctctttgtattaaaggaaatctggtttatctctcatatgttcacttccctcataactttttacaatgaagatttctttttccttgtctctccctctcctctgtggccttgaaccaacatttcttccaaatcccttcccctcagagtcactccggcttgtgcttgaatcctgagtttttaattctacttatgttaactttcttttgagtttgttttctcatcttctaatggagaaagttgtacctgtcgtggggtggtatgttattttcctaaggctgccataacacattaccacatgttggcttaaaacatcaagtttattttctcagaattatggaggccagaagtctgaaattaaggtgttggcaggacagtccctctggaggctctggggaaaatccttctgcgacttccagcttcaggtgcctggtggccacatcactgcctctgtcttcacattgccttcgtgtgtgtgtgtgtgtctgtgtgtgtgtgtctgtgagagtgtgtgaaatctctacctttctcttagaagagtacttgccattagatttagggtccacctgggtaatccaggatgatctcctcatctcagaatccttagcttaattgcatctggaaagacccctttctgagtgtcacattcacaggttctgggaattagggtgtgggcatatctttttggggatttccagtcagccaactccaggtggttgtaagaattaaaggaaatataattgtgtatgtgtacttaacatatatttatatgtggacttcagctcagtgcctgaccaaactcagcacttagtaaatgttagttcatcttctgctcttcagaaacctatgcctgccaagattctatatccctggacgatttcggcagtcagtgctcaattctgaatgttgccttccactttgtcccccgtgtccatcctcgttgctgaccaccaggatgtctagctcttgtcttctgccctcactccgcctgggcatgccctgggtgtcagcatagctgtggcctgctctcccttgcacctctccagaccacgccttcttaaccttctgcttctggaactttctcacctctgttaacagttatgtctcatcctcacaatgacttctcgtcctttcactctcctttgtttttttttaaactctccatctgcttgacccttcctaacttccgttactacccatctccactcagggcagattgtcattccctgggtgtgcactgcccctgtgcacttcagcctctgcttaaactttcccaccaacagaatggttttttctccttcctcttgcttcttttagtgcctgaaattattcaccctttcttctagtttttttccactcaggctgctgacatgctcagggccctgctcttccagaaaaccttcccttgaccttgctaatcacttattttccttttctgaaacttgctgctttcactttgtcagtatccactgaaatctttactattttcctttggtttccactgcttcctgaagctgctgtcttaaaggcttacagtgatctcctgtaggctttttaaagaggctaaatggtgtgatggtcaagggctagcttgctggggccacactgctgggatttgaattctggctccaccacttactaacaactctgtgacctgtggcaagttatgcaactccatgcttcaatttctttatctgaaaaatggggataataatagtacctgccttatagaattgcttgtgaggattacataggttagtatatgtaaagtatgcttgacaaagagagtatgctgaatttttttaagctgttgtttttaagtccttctccttagcatctgcagcatttcacgtggtttacctctccctcttctttagtccattagcattttcactgtgttcaagctgagattaattcactttgggatcttttatctttgtgctgcctatttgtggtctgtcttcatacatcagatcttcaccttcttatctcctttttggataatttttcctctgggaatttatcacgatagttccaggttttacatttattgaatgtctccccaaatggtatttctagccctcttgtagcttcagtcctacatttataactgcatcccagattgcctgaccaagatcatcatctccctctcaaaatcatttattcactagacttttgttaagagacctgggaactgtggcagcatgtcatagcagctaggaacagagatatcaggatcacagggatgctgcgttggtgtcctgcaaagcccaggaaacagttctagatccctgcaggcaggcatgttcttcttatcttgaatccttacagcactgttagtgagcaaagctggatgtggaaaggggctgggaggcacagttttatagcagatgtgtcccttaattttcttaagtgaagaattagacaagtttgcctcataaactcaggatagaatgcctggcccaaaagctttcataaactgttgaagataggttttattctttctattttttaaatttttttctgatgttgttaccctctgggaagcagaactggtaaagaagttagatttatgtctcacaatgcagagtcaaatagaaaatgaatgaaattagagaacacacagcatggttttaattaagcagtggtaggtttccctattagttttatgaaatgagggtttcttataaattggaatagatattttagacaaggattttctctacctaaagtcttgccmataagaaattacattttattttttgcaatctatccatcggacaaagggctaatatccagaatctacaaagaacttgaatttacaagaaaaaaaccccatcaaaaaataggcgaaggatatgaacagacacttctcaaaagaagatatttatgcagccaacagacatatgaaaaaatgctcatcatcactggtcattagagaaatgcaaatcaaaaccacagtgagataccatctcatgccagttacagtggtgatcattaaaaagtcaggaaacaacagatgctggagctgttgtggaaaaataggaacacttttacactgttggtgggagggtaaattagttcaaccattgtggaagacagtgtggcaattcctcaaggatctagaactggaaataccgtgtgacccagcaatctcattactgggcatatacccaaaggattataaatcattctatgataaagacacatgcacacgtatgtttattgtgacactgttcacaatagcaaagacttggaaccaacccaaatgtctatcagtgatagactggattaagaaaatgtggcacatacacaccatggaattatgcagccataaaaaaggatgagttcacgtcctttgcagggacatggatgaagctggaaacgatcattctcagcaaactatcacaagatcagaaaaaccaaacactacgtgttctcataagtgggagttgaacaatgagaacacatggacacagggtggggaacatcacacactggggcctctcgggggttgggggactaggggagggataacattaggagaaatacctaatgtaggtgacgggttgatgggtgcagcaaaccaccatggcatgtgtaaacctatgtaacctgcacattctgcacatgtaccccagaacttaaagtataataataaaaaaaagacattacattttatactactactaataagcaagttttggatttgggttaacatagttttatgtttggaaagcagacaattggaaccattctcatgctggtttagtgtgtcttgcaaccctgtgacatagcactttcttccggttaacagccactttctgtttaaacacagcttcattccctaatgggttttggtctttagggattaaacccatgaggaccattaacctgaggaatgtaactcaattagctgtaaatgatttggaataaaggaatagattttctatttggagaaattggtgtgttgcttttcttaattttggtcttcattcatctaatgaatagtaaatgcactcttttggtaaataattcacctttgttagaggtaccataaaaaatcattttaaaggcctggtgcggtggctcacgcctgtgatcccaccactttgagaggctgaggcgggcggattgcctgagctcaggagttcgagaccagcctgggcaacatggagaaaccctgtctctacaaaaaatacaaaaaattaggtgggcatagtggcaggtgcctgcagttccagctacttgtgagactgaggtgggaggatcgcttgagcccaggaggtggaggttacggagagccaaggtggagctaccgcactccaacctggatgacagagtgagaccctgtctcaaaaaaaaaaaaaagatcatcatttttaacagttttgttacctacaagttgtataatttaaaaagttgtttccaggaaacataataatgcatataatgcttctacttagcatctcatttcttargccagggtcagtcctggaagtacaagttttttgccttaggctgagttctagtactttgtggcaggttttcttttcacagtttggtgtagcacaaatataagatgtttatattactgacaacaaatttcatatgtaactttaggattaaataatccaaggtgctgcaaaccaggtgtcattagtaatctatgtgatgctgccccacccagataatttcagttgaactttgggtcttcacttaggcggagttgttaatgttagcttgtcttctattgaacattttcctgcatttttggttggctgttcttttagttttcttttttctcttcgtctcttttcttccatgtttttgtagttaccaaagatgaatttgttgctgtagatactttcattatkaaaaaattaatatggattaagaaattagaaaaaagtctatacaagaataagatcaggaactaatacatttaaaaatagaggaaaaaagaattgagatattcaagacagattatttaagtataagcaatggaatacacaaatatgacaagtcttataaaaataaaagggagtgcttgctctggcagcaaatatacaaaaatgggaacaatacagagattaacatggcccctgcacaaggatgacatgtttattttcaaatttaaatacaaaaggggagaaaacaattaaaaatcaaaagtagaagagattcgaaaattacgtaagttatgcacagctttacctaatttgaatatctcaatgaaactttgaatctctgggacaaaatactccaaattgtatcaagaataaatagaaactgaaatacacctaatacaatttctggcagagggcaggcattcaacaaatcaacaaactgatacatggacagagaggaattggaacaggtgtctgattacaacttttttttttttttttttgacacagggtctcactctgtcacccaggctagagtgcagtggcgcagtcctggctcggctcactgtaacctctgcctcctgggttcaagtgattctcctgcctcagcctcccgagtagctggggttacaggcgtgcgccaccacgcctggctagttttttttttttttgtatttttttagtagagacggcatttcaccatgttggccaggctggtctcaaactcctgacctcaagagatcgcctgtattggccttccaaaatgctgggattacaggcatgagccaccacgcccggccagattacaacttttagatgactttttatgagaagtcaattcaaacttttaagggcttaatatctgccacactatatcagttgttgcagagttaagaaaatgacagcaatgtgtacagtctattttatgaaactaacattaagaacaaaaacatagatggcaaaaaacccacaaaccttacttatgaatatatatttaaattgtrtgaataagtttttcccccatatggtctatttattttaaataatttcaacttttattttagattcagggcatacatgtgcaactttgttacatgggtatattgcatgatgcagaggtttggagtatgattgatcctgccacctaggtagtgagcatagtacccaataggtagttttaaacttctgccccgctttgtccctccctcttgtagtagtccccagtttctgttgctggccatcttttgttcatgagtacccagtgtctagctcccacttacaagtgagaacatgcggtatttggttttctgtgcctgtgttaattcgctaggataatggcctgcagctgcatccatgttgttgcaaagcatatgattttgttcttttttatgactgtgttcttcattctttttttttttttttgagatggagtcttgctccctcgcccaggctggagtgcagtggcgcagtctcggctcactgcaacctctgtctccagggttcaagccattctcctgcctcagcctcctgagtagctggggttacaggcttgcaccaccatgtccagctgatttttttgtatttttagtagagatggggtttcaccatgttggccaggatggtctcgatctgttgacctcatgatccaaccgcctcggcctcccaggaattacaggcgtgagtcttcattcttttaaagtccacttaagtacaaaaatgtagtcaaaatgtgttgtatttgtaaactagtatagtaaattcaggtgtaggcaagttaaatctaattataagactactttctagaaagcctgtagacatgcttttaaaaaaggtatctgtaaagcttatgtgaaacctggatttctgtttgtctcttttttctggaggtgaaagaaaagttttattttactctgcttttctagtagtttaatttatgctctcttcatatgtactttgagcaagttcacatttacataaaaagtgggaaagaaggtagtaaacattaaatttctctcatccctctattccatcttgagaaactggagcagcacttagaaaattagtcagcattcctaatttttttcattcagcattcatctttggagagtgtcattactgtattcagagacagcttatcttaaaattgagtcattcactgaggcttgcagtttcttggtttttgccatgatagtgagcctctgcctctcatctgaatggagtttatgattttttagctttgtgtttagagactttaaagaagaatgcactacttgcacacctgccttgtgaaaacgaggaaactgagatccaaggagctgtacaaagttaygcacagcactaacagaattgggaccaggaaaggagtttctgacttagttctgtgcctctggggagtctggacatctcaaaagttagggatttttgcgataaagctttgtcaatttaccagtttctcccagcagaagaaatttgggtcctatttttgaagcacttattgtgaataattaaattgagctgctttaaaaatacacattgattttgattttatttgcttttaccatcctggtagaaagatttgtgattgaaagggagtgtaaaagtttaattaactcttagaaatgacccaaacagatactgatcctagatcacccctccccgcaaacacatcaagaattttcaggaccattgcaagatctttattcctactagatattatgggatttataaggaatcctagcttttgtgaagtttttggtaggaaattaatatataattagagaaactgaattttgtaactgtaggattgagcatctgtaataaaatgcctttttgaaatttctaagtatattttatagtagaaaatcacagatgtgggggttcattataatattttagtttgttcagttagtttcattctatttgataggtgggtatttcaactttttttttgtttttattcttaaaaaatcagtttgtttttgtcagtttttatagtaggcaatattttatatttctgttttgcgtttggacgtgctgattgagtcagtttatgtttatkgggcacttccccaattctgaatattattttattaaataaaaaaaagcttactgtgttatgacattctttctctatttttcttttatagccaacacatatctctttatggtacaagctcgaggtataatgttgagagaaaatgtgaaaacaataggtcatatgatcaggctgtacacaaataaaaacagtacgctcaacggtacaggtaagactacttcctgcttaaccccttgtagttacaaagcagtaaaccaaatcttttacagtctgttttgccttcaggtaacttcctgttaaagatgaagaaggtatcttcccctaagcgtcctggtagattattttactgtgcaaatcaagactgttacctattttaggatgtatgaacgtgtggtcacaaaagtgatgaggttttgtacagacacttaagttaattcttgtaaacaaaatatagaaagcagcttctactttttcaattcgtatgttgtatttaagagaaattaaccagagaataatttattcatcttagtaagccatactaccatctctctttatgttcattctagttcctaagttgttcttccaactaggtctagaaaatagttgtttttaattatagaagattgttaatagtgttatggcctttttaaggagctaaaggagaaattttataaaattggaaattggtagctactcctttttattttacttatttatttttttagacagagtctcgctctgttgcccaggctggagtgcagtggcgcaatcttggctcactgcaagctccatctaccaggttcacgccattctcacgcctcagtctcccaagtagctgggattacaggcgcccatcaccacgcccggctaatttttttttaaatttttgatagagacggggtttcaccatgttagccaagatggtctcaatctcttgacctcgtgatacgcccgcttcagcctccgaaagtgctgggattacaggcatgagccactgtgcccggcctactcttgtctttttaaaatgttacctggaagtagaagctccattagaattccaggaggttaaaatctaataggctgaaccaataatttaatgatggtagaattgatgtaaatagatttcactattgtggaagaatgtgaatgctcgtttatggcagggttgccacagtgtctgccagggtattattaggtgttactttaaaggattcagtggggttgtcagttgttgtaccctttatggtctcattttgaacagttaaaaataaagatttaatttgtgttagtaattcttccttgtgtcactgtaaacctacacattctactaagagaaagtctgtctttcagctgtagatgttctttcttaaatgtatgtcaaggtgggtgatagttttagacccttctaaaaattcaagactgtgacatattgatctcaatttaatatcacatgtgcttctataaaatccattctagtcatttgcctaatatgtttatgatgccacaaatcaaaacactcttgttttattttaattttttaaccttgaaggaatttttttagaagaactgcctcagcatagttgatgttttaattctacagtaaaagtctcattaactattctttagcatgaatgagtcttctgaatagtaggtcaattttagaagtttaaacattttaaaagcttctgtaggatttgtgctggttgaataagttgattgtaaaaatgttcactgaaagtttgttcaactgaaaggaaatagacatctttaaattggtgtatttgtgtgagtgctaaaaatttgtgcatatcagcttgttttccctggggtatgaataaggtatatgtgtggatgttgagcttgattaggaggaatgattacatgggcaagacaatctttccccatagtatcctgcaaccaaaaaaaaaaaaaaaggaaaatcctttcctcctctcaccaagtcatagtttcaataaagaccaaagaaccaatgcatacttagattaaagtttgcttacttttatgaaactttgaaaacttttcatagggttcctttactaatggtaaaactgttctcaggaaacagtcattgtatacattagggattaggtttggatgtaacagagacctgcctgtggtggtttaaacacatgaggctttctgttctcatgtgaaagaactctgcaagttggatatctgtggctgttatggaggctccttaaagtaagtcatcacacacttttcattttctgccatctgtcatgtggctccatggttaactcatagtctaagatggctgcttgggtgccatcttggtgtttgaacttgggtcagtaggaaggaggaaagcgagaacaaagaagaacaaataaggtacctcttttctggagccttcccagaggtcccacacagtatttcttcatacatttaattggctagaacttaattgcatggccacatgcgataacactgggaaatatagtcttgaccagagtatgctggaactctagtgaaactggcattctgttacctacggggaaagggaagaatggagtttgagtcagcaatgaggctccgccatgttcatttagccaacatttacgaataattattatagttagtatatttaaccagatattggagacacaatattaagaaaaacagtctcctttaatatgaggatctctaggcctctgggagagatggaaacatgaatagttatttataatgcaactggttatttctacatagacttctatagatacaatatccaaaaaagaagataatggcctataaggtgtacaaaaagctaactgagctctagaggggaattgattaatatgcagtggctcatttataatttaacactaaatgataaatagattgtgatagttataagcacatttgatttccaaaaggggtttttaatcctatacctgactttctgtggcatcaaatataaatagatgtatactatttttgtaaataaattatatactctcataatcagatggtgccatgtagcccacagagccaaattatgaaaacaagacgtattcagtgaattcatctaattactgaagcagataagggccatgcaatgttagagtggataggtttgttggaaataacccagcatgcctcctcatttgatgggtacatgaattgaggcccccagacactgccagactgacaagacaagttagtgggaaacagactaggactctcatcggtttctaacacctgttttaagctgctgtttcgcagcaaaataaagccattaaaaggtgttctttggtgctgtcctccttttcctttaagtgataaggtccagtgagaattagtaggggatccatctggcagttttcattctttgtttgccttttctttggttgtgtttctggaagggaggaagaaagcagggggcccagagctcattttatttttatccattcattagatgaaataatgtctaccttttatagcagttgtggtggttcccaaatgcatctgtcatacataaccttttaaaatgcttcctgactttgaaagcagtggttatacatgatggacattgctcacctaacaacttttgtaggaataatgattttgtgggtttttttgtttttgtttttttttgagacagagtctcgctctgtcgcccaggctgaagtgcagtggtatgatctcagctcactgcaagctccgcctcctgggttcaggccattctcctgcctccacctcccaagtaggtgggactacaggcgcccgccaccatgcctggctaattttttgtatttttagtagagacggggtttcaccgtgttagccaggatggtcttgatctcctgaccttgtggtccacccttttggcctcccaaagtgctgggattacaggcatgagccactacgcccagccaattttgtgggtttattacagtaaaatctccaaaagcttaaatcattattggctgtattatcatttgtgaggtgtttatttatagtatgttcctactatgttgtaggtactwttattaggtgctagaaatcaaagataatttgatttcaattaaaagagatattcagaataatggccggggtggcggatagactatatacacataatacattgggaagacacaaataccacyggacagagtactgaaggagtgtggaggtgtttctctaagtctggcagtgagttgagctccttaggaggtggccaagaatagcagatgtttagctctaaaactttgtattcaatgaagtgaatataatgatattgcgtaacttgaaggcacttaaatgtggttctttaaaaactgataaaagtgatggaatgtttactcttgtgattcagtcattctagcactaaaataaaaagtagaacaattctctctggccctcctgttgccatctgactccccagaaggagttaatagtttgttttgcagaaatgtctagagagccgagcacttctgtgagttggatgtgggttcagagaatcatagcatgtggctaagagaaggagcccaagcattaatgatgaaattaataaattatgcagagtaaggaaatactcttatttaaagttaatgcatgacattaacaaaaggattgaatgaaaatgtagatatttttctgcctcaggattataagaaaatgagccttgtaacgtctcaaggcagatgacccccagggacaaacttacttttttttcttttgtattttaaaatattgttatatcatagttgtacatccaaggacaaccttatttattgtctcattcctgtgaatgtgtagtgtatagtatgtccttagtaaaaattgaagagattcagaaaaattatcatctctatatagctagcccatctttttttctggtggtatgtgcaacaaaagctataatatgaactctgtgtgtgtgtgtgtgagagagagcgagagcgcacactagctaattaatgaagaacttgccattcaatatttattgttttaactgctcatttattcatattcttgcatttttaagtagaactttttatattttaatagtagaaaagggtataatgtaataacagtctcctagctcactcctccctgagtcccaatcctcagagaactaacaatttattctgtatttatctttatgtttctatcctgctgtctcttgatttatcaatttaaactactcttgttatggaagaaagacatttagtattatagtctcaccccaatttttcctatccttatccccaatataattatgtcacaatttaaattcaaatcggtattgttgatgttgttaagagaatgtagataatggtttgttttcctgagtctagttgtgattgttcgttttgtagatctgtttatttttgttgatgttacttgttaactctttttccccccaatttgcagagccgtcttaatctatcgctgattttcccttaggcacatgagttgaccacgctaagggggggtttccaaaattcccatgccattgtcttctctcttccagtgctgcttttgagaagtctgttgaccatcctgatggcagttactgttcatggaccagttttttctggagacttttgggatctttttgtatttttaaattttacaaagagcatcttggagctttgtttttcttctcttgctgggagcagtcctatcagtatggaatatcttacccttcatttctccaaaatatttttatattatttctttgataatttgtcttcctattattttcctttctttttggawctcctattatgtattatttctctctcgtttttcaattctttttctttcctttctatctttctgggagattgctctgactttactacmatgctttgatttgattttttaaattttggcaaacttatttttaagaattcttttttttttcttttcttactgttactgtctccctcaaataagaatgccttatcttcctttccaggaatattgaagataaataagtaactctaaggtgtaaatcaatgaacttgactagacactgtcacaaaactcataacaatagtaatcttaagcagttttggtgggagtgacagaaacccaattcatgcttattgcacttgctgctaccactrgcaaggtaggagtccccatagagagagaagccctttttttaaaaacaaaaacaaaaagaaaaaaacaagaattttggtatatatgtagatatatatatttaaagaatcaggccaggcatggtggctcacgcctgtaatcccagcactttgggaggttgaggtgggaggattgcttgagccgaggagttggagaccagcctggcaagaccctgtctctacaaaaaatacaaaattagctgggtgtggtggtgcatgattgtagttccagctattaatagttgggaggctgagctaggaggatcacttgagcccaggaagtcaatgctgcagtgagctattatcatgccactgcactccagcctatgtgacacagcaagatcctgtctcaaaaaaaaaaaaaaaaaaaaaggaaaagaatcagaactttattggacttccttacacttgcttttgcttggtatctttaaatcttttagacatatggggaatacattgagcatgggctaccagtgtagtgtctgtggtcttggggtgtcactgggcatacaaaacaattaatgttcactgaatttctcctccccttgttatttggaagattttccttgtcagacactttccagcactcgcccagggagagtggggaggattgtctcattggggctttcccacttcctggtaggataggccttagcagttgtaccatcattgatctctactatgttggggttttctgggaatgcatttaccttaacaccttactgatgccctgtgaaatttgtaactggggtttccawgcacttctttggaattggaccttctcttgtggcttctgtttcctccttgatacccagcctggaacctttgcccgtcccaacaccctctgcttagcagccgtggcagggcctctttcattcagcagtcttgcaggtggcgtgagtctctgccctgaagtactgtcctgactcctaggcagcatccccaccaactccattgtgacaatgactgaatattgatgttaggtaaaggtgtgcaatggaggtgcttagttttctttggctcctctcacatacttcctatctaattcgcaggattctctcatttccctatggtcagagggtttagcttctacattktctctcattggagcagattactcaacattcaaagaatatcttcacattttcctaaagtgtctgctagagtttcactttctgtagtacattgtttgtgatccaggagacagacggtagtttaatgagctgtttccgtctctcatttcactcattgcatgttgatgtcattctcttaggccagcttccctacatagcaggaaacctgtgtgtcatggtttctagatttgcgtctcagaactttgctccagaaagggactgaaatgtgatctctctggttccacattcaaaaatcctgagcctgtgactgtctcgtgggtcaggtgctcatctctaatcgctcatagctacagttattagctatttctatgggccagggattgttctcagcaccttacacattttgtcttattgaagtttaaaaatgacagtatgaagtaggcatagatggcaagctacatcgtgtcctgccctgtatcacacagctacagtgtgttggagcaargatttgaactcaggcatttgactttggtgccctgtatgcagtttaatttgctgactctaaagataatggacctaatgtaataatagctccagggctcccccggggctgcagcccacaggctgggaatgactaacttaaaggtttagaatgagctgtattacaaaagtaagttgagtgggtaaatctcagtttctacagtgtgaggtggtaagaaaacattactcccacccctctgctctgtggatgctagtagcagcacgcagyggtttggaacacccctggctgtgccatagtggaggggattccctggtgtactttcacactccctktagatcgggctcagccaggggagggacgggagcaggtgttctcacatggttgcaagtgggactgccatgtctgtgtgcaaggataagggtgtgctgctctctagatgtctcttgggaaatcatgctgagaggtctgttccccgcagcagtttgctgttctctagttccttaaagataattgattttaagtacttctgtagattgtatattgtagttttctcccagtgatagtgacgtatttcattccagggrgaaagcaaaaggcctttttttttttttgtaactcttttctctctttccaagattatcccgaaggcaataattcaagtgattatcttgttcaaacaacaacgtatctcccggaaaacttcacatactcaccatacctcccctgtccagaaaagctgccttatatgcgtaagtcgtcatctaattttgacttaactgtttacttgtgttacaatacagtcataaaaaccacatgatttgagtgcarcaggagcaggtcatgtgcacctgggtgcaaatgtttatattatgcagcatgttatttgaacttttatttatttatttattttttggcaaagcgcwttttgaagggggatgattgaaaagctgaagaaaaatacaaagggggaaaatgacaaatacccatattgttcccaaccagttttaaaaactaatacttcggcttacctatgtccaagttcttttaaaacagtgcttaagagagcaattaatgtgtagtctccttttgaatatgttataatgttcctgattaagccagtcctttttgaccaccatccccagtgctggctccccattccttcctcagaagtaacctcacctctactgagagtttgctgagtattctttccggttatgaaaattgttttctacatagatagatgtctgtatagaaaatagatattgtttcaaaggagaaattatgtaaattggtctataaagtacatttcattcttgtaacttgcttttttacatacttttttgagaactacccatgttgttacatatagatctaatttttttcccttaactattactgtgtggtacgtctttgtataaatgtatcacatctcatttacctgtttccccactgatgaacatttaggtggtttcaacatttttgctatcacaaaatagcaaaaaaaatatatatatatattttggtataaagaacaacagagtgtgagttttcctgtgcgtatatgcatgtgtacttgagggttgatggctagtggtggaattgctgggtaggttggctcaggttttccagattttgtcaattgctctcaaaagcagctataccaatttatatccctaacagcaaagcatgaatgtaccactttgatattgatggacttttaaattcttgctaatctgaaagataaatggtttctcgttgtttcgattttcacttccctcattcctggtgggtttgagtaagttttcctatgtttgtgtttttaaattttctctcctgtgacttgctgcatcatgggctttatcagttcctggttggttattgtgtgttggtattgatctgtagaaattctttatattctggcagtggcctgttgtctgctrtgtgttttgtaagtatcttttcacattcccaggcttcttgttttgtcttttattttatggaagtttaaaattatgaccttttcaaattttttaataactttacttaggtgttttgcttttttttggtcttaaaccttttcttacccagaggccatacagataaatacctttatttccttctaatgattttactattttgtttttaacctttgtgtgtaatatgtggtagtgataaagctactgtactttaaatatatatatttttaattatgaagataatacattatcattattttaaaaaaaacactatactgtactgtcaacactcagaagccacacggctattattttagcttttttttktgtgtgtatcttctacccctgccccatgatttttaagcctactttgtacatataggtttgtatcttggatttgatataaagatttaaataaacatctttttgaattgcttatttatccatattctgatgtattttgtatctgtgttttttattcttgacacgagcttttttaattgaggaaattagcctttgcctatcatatttgtaggayttgttttagcttattgttgatagatattatatatcaataataaaaagaaagattgaccttctaatatcatctaaggccatggctttcagtcttgggggtacatcagaatcacccagatcatcttgtcaagccccattgctggtccagctctcaagagtttcagactcagcaggtctggagcgggcctgagaatctgcatttctaacaaatcccgcaaggtgatgctgttgccgctgagccttgggccacgtattgagacccmctgatctagagtagtgggcctggtccctggtatttaagaaaaaaaaaaattctcaggtgattctaatcttgctgtctctttgctgtaccataataaagaatggaactcagtgatttttgtggttgtcattactttgttattgcagccttgttttcctaaaaatgaatacttttgtctgtgtaatactgaaaccactgggtaatgttctgttgaaatattgattacaataatttcatcttcataattttcatattcaaggtttatagtttcaggaaatctttctgttcttggtttagttgccattttctttaattagtgctttatgagtactaattaaactctatttcaaagcatctgtctgccacttcmtcattctggtactcctctcctcccgccccacagcccattgtaccatctcttgtggtgcctgagagattgcgtygtgcgtggctgctgtgcactgccttttcactgggggtggggaggggtctcagcactactgccccttctctctgcttccctgggatccttgcattcttttataagagaggatcacactagtgtggccagccatcttttcacagcagtccctctcatgggctgccaactttgggtcctgtcccaattttgtgcccaattagtggtggccgtggtggccatggtggcaaggtgatttggtagaaaatacagccacatacagataaggctttagaaaggagccatgggtacagccaacataacgaggcttctgccaagagagccttgcacgagctgcccgacagagcacttcacttgtcctgtgacctccgcaaagtggaggcttagtttacctacctgtaaaacctgggattccaataccatctgcagagtgtggtaaggatagaatgaagcacacagtgcttaaagtttgataggtattaatttgattctccctttccttctccctccttctttgaataatagagccagactttacaatggtcaaggaaatgagacacctaggagaaatgtgtggagtttagaagttttattattagctatgtatccttacatttttttacttaaaaagatagttttcattgataatagagaacaatgcaataaaatacataagtataaaatcttataatagttacacaaaataattgaatatgattctttcccaaataataattagaagggatttgtgtaagaattagatctacttagatgaaaaccattcaagtacaagtaatatttacttatagtcactaaaagtgaagttaaggcttaacactggtgtatttgattattctgttgtaaacttctttgatttttacttagtatagcaatggaaacactggcactggatttctgtaaagataaagtgaatttttcaaactagaatacagataaaatgtgtttcatacatttcagcagtgtttcatattcaatagtggccaattacactataaagcctattttaatatgtatattttatatgaagagtatgagtgaatacttctttcttgtttgttagtatttatagattttccaaagggcaaatccacattcagctttattgcatttatgtaagattctttgtgctaacaaagtaaaatagaagtttcaccttgtctaaggctaaaaattaataagtgcttagtgtggatgttttgattttaatttttatgggtgaggtagaaatggaaaatgtcaattgcatactctgcattagactgaaaatagacttacctttagttttcctatcttttaattcttattcaaatagaatacgtttgcagtgacctttatatattctgttcttactatttgtggaatagttccctttatggtttaaccctgatagtttctatagttgctaaccttatgaatataacaaaagctccaaggacttcttgagatggatttaaataattcaaatgaaaatcagcaaagaaggaaaagataagcaaacaaacgtcagcaaagctcaaataatgctaatgtaacaaactgtcatgcatatgtttattgtaaaaaaaaaaaatgagatgggagccattttagagtcaacaagtcatkgatgaacagccgctgtgcagcggtccctgtgttgttcatagaagcaggtacgggagagacaagactgaacgtggtcatgtgtgtggcagcttggagcaggtaacacacttggagaaaggcatgctatgaaaagattatgaggccgggcgtggtggctcatgcctgtttcctagcagtttgggaggctgaggcaggtgggttacttgaggtcaggagttcaagaccagcctggccaacatggtgaaacctgtctctaccaaaaacacacacacaaaaattagccaagtgcagtggtgcgtgcctgtagtcccagctacttgggaggctgaggtggagtatcgcttgaaccttggaggcggaggttgcagtgagccgagatcgcaccactgcactccagcccaggcaacagagcgagactttgtctcaaaaaaaaaaaaaaaaaaaaaaaaagaaaaaaggttatgaatgtgacaaaagggagacagcagtttattttggaagggaaaggacgatgtcagagagaggtgtcatcagaactgggtcttacaagatagctgagagagaacagcatcaccacaagggaggctctgtgtattcccggacyggagagtggtcggctctgcccagagagggtgtgttaagtggcgtgtatgggaaatgaagctggctagaagggtcttgtgtaaaggactgaggaatctgagggccttgtgggttccatcattcctaggcatccatgaggtgagcttcagagggagaagagcctgtgagcttacatgcagacagttgatttatgagcctgtatgcatttctctcaggtgacagtgcatgattttcaaagggtctaggggcaaaaaaaaaaaaagcaaaaataaacaaaaaacaccactgctttagggaaatggagaaccatcgaaggctttaggcaggtgaatgatggactaggattgtattttaggaagattattcacatgagaagctgaacaatgggtgagaatggagaaatactgggatcagcaggagaccaatgaggagcttgctgcaggaagccgacgggcaacaacaagggcaagtgccaaggctgtggcgttggagagaggagaaggcacaaaaaagaacctacagggtgccattggccagatgtggcgaccagttgaggggtgagggttaatttccaggtttctgacttggtgaccatgaactgaagtgtgatacagagtaaccgtcgcatttggaggatggggaagttagtgggttccgtttgggccgttttgtttgaagttcaagagggttaacttggggtctgcctttagtaagagatccggactgaacatcagaggaagtgagaggggaagaaggctgagagtgggtccctgagaaaatccgtacttgtgaggtgagtggcggttaacagaagaaggggagacaggaacctagagaagccagagggtggtgtctggggggcgaggcaggaacacatcccagagagacaagactgctgtgtcttgtcacacacctccagacagcagggagagtgaggaactgtgaaagggccactgaatttggtgcagaaaacgaatggagaacacagcaagcacgaattcagtaaaatgattgggagagaagcaaagtagactcttgagaagtgcgtcagaagtgtatgtagactgtaggtgaaatgagagaagtttggtggcaaagggaaggagattggggtaaaggatctggaggaggtggaggtaagggaagagctctttaggaagagatggacttgagcatgttgtaggcatcatggaaagaaaggatggagagaagaggccgggcgccgtggctcacgcctgtaatcccagcactttgrgaggccraggcgggcagataatgaggtcaggagatcgagaccatcctggctaacacagtgaaaccccgtctctaccaaaaataaaaaaaattagctgggcgtggtggcgggcgcctgaagtcccagctactggggaggctgaggcaggagaatggcgtgaacccaggaggtggagctggcagtgagctgagatstcgccactgcacttcagcctgggaaacagagggagactccatctcaaaaaaagaaaaagatgaagagaagagaactgggaaggatgagggagaagcacaagggaggtctccatagagccaggttagaaagtgaatggagacaatgcctcaggttgaagagtgagcatggaaagcctcaggaatgcctcctcccctgaggaagcccgcggtttatttggagatgaggtggagaggtagggtgctcgtgcctgctgtgtctgttttcctagtaaagcaggaggccgtgtgtccctgaggggatggccaggaaggaytgagcagcttgaaagggaggagtaagtatttaaaaagttgtcatagggaatgaaaagtgaagtcaactaatcataaattagaaggtgactaacaggttatcctagagagccccccaccccaccctggtggagtcacaatacaaaaaaaaagtgacacttgtttttgctgaaaccttactatgcttgaggcaatatgttaggtattgccacccaaatgatgggattaatctatatgcttacgtgctttctttagtgctgtttattaggtaaagaattggagcatggataattgtcgctgcaaggatgggacctgtagctcaggtgtggcaggttgagggggtggtagataaggtgtttgtcagtgtgtaggtgctgtgatcgggtgaaggtcatagagctgcatttctcttaagtgtgattcagatgatctacacttgttaaaaatgcagctgggggctgggcgcggtggctcacgcctgtaatcccagcactttgggaggccgaggtgggtggatcacaagctcaggagattgagaccatcctgtctaacacggtgaaaccccgtctctactaaaaatacaaaaaattagccgggtatgatggcaggagcctgtagtcccagctactcgggggtgaggcaggagaatggtgtgaacccgggaggcggagcttgtagtgagccgagatggcgccactgcactccagcctgggtgacagagcgagactccgtctcaaaaaaaatgcagctgggatacctgttaaaaatgaagcctctgagctaaaccctagactgcaaaagtcagggttcttggttgcaaaccacagaatatactttatctgatttaagagaaaaaagaattcatgaaaatatattagagagcccagagacaacctgggtggctagagaattaggttgagaaattgagcagccagaacaaggctcagaccgctttgaagcatctcctgctgccacttgtcagggcttaaacctcctaccagcattgctcaggtctggagaccagaagtgccacttcttggttcctgtaaagctagaagcttttgccaccacttygggtgcatttggtcatatgaccactcctacctgttagaggggtttggagagtgggttctagctttttcctttgaaaggcaggacccaatggtgggtagttcaagccgttgaaatgtgttcagttaaagccagtggccataaacgtgacccatgagcttcaactgacacagaaactttgacaatgtggccagtcagctgcattttaaacaagcacagctggtaattcttaggcacacatcaaaattagcaaaccactttatacagaggccagtgtggatatagcagagaggacttcaagtcttcatggaattgaagagggacttcatgggaggggagtgggagaaggtgaaagagaaagaggctttaatgagagggtgcagtgtcagagttgaaagccagtcatttctaggtgactgtggttcagggtctggacacagagctgggtgtcactgtgaattcactattgtgaatattgctgcaatgaacataatagtgcatgtgcctttttggtagaatgatttattttcttttggatatttacacagtaataggattgctggatcaaatggtagttctgttttatgttttttgagaaatctccaaactgctttccacagtggctgaactaacttacattctcaccaacagtgtataagcgtctccttttcttcccaagcctcgccagcatctgttgttttttcacttttcaataatggcttttcctattggtatttgatgctgtcttatcgtggttttaatatgcatttctctgatgattwgtgatttggagcatttttttttgtttgttggctacttgaatgtttccttttaagaagttagtatcttttgctcatttttttttttttttkgctcattttttaatggggttgttttttgcttgttgaattgtttaaattccttatagattctggatattaggactttgttgtatgcacagttttgcataaatgtcttaaagaaatattttagcacctgatggagccagggagtagaaatgcaggtaggtggaagcagggatgagacaggaatcttcctactcattcattcattcattcattctgtgtccaggcattgcccttggcagtggggatgtgtgactaatgctctgtcttatgtttagaatgctcaggtttggttgcttcaagaaaacttgagtaataaatcgtttgttaagcagaggttgtcaaattttataagtcgagaagcttaagtaaagcatttgaaataggcagtrtctagtgttggcttcagaaaggacaggaggtgaccaatggctggatgactcataactgttcagcctcagagctgtgcttaggaggcagcacagagtgtgggagggaatgtcccatcttgtcataaaaatgcttttctagctttggagaggaatttaccctaagggacatttctaggggaaattcaggtctttctctgacactgtcatcagctctttgagctgtgaacatttaaaaccctgagggtaaaacagacaaaagccaacatatccagaattaggttttagataccaaaaaatagatataggctccaagcaaaatgaaatagttatttaaaactattgatttatagaacaaacaactctctggagattatatgccttaaattttacttgaaatgttagaaaaatataaacgtaggtaattcataggttttgaatatttgttattttaagaattatattttaatagaaaaagtaaaatcctaaatcatgtcatgtgatacattatcatccatagcacaataagcctgttgtttgggcccatgcatgcctggctttcccagatgggcagcattgctgcatatcttgcaaattcagcattaggatatagtaaatgtcctacataaccaatggtgcaactaagttaccctcacacatgatagaagcagtttggcacacacgactggaaggtagcttccagctgacttgagttccctgtccttcaccttgaccttctmggtacttggcagcccctccactcttcagacactcagttctcctgctctttcctttctaaccccagcgccaccttcaaaatagtgaaattcagtatttggtaaattatattatttacatttgctgattgtgattacactgctrggtaaatggatttcagtcaacatatttattttctgatctttaaatctctaactgggaaagaaaccacttgtgccagttaaaaatctyagatttatactattacatctgggattaagaacaacaacaaccaatctcagattcaccacagaggagagtgaagattggctctccatggagttcagtggatctcttcagttgcccttgaaatctcagcgagtgaaataaaggggactggcccagttgatggtgtccttctttacaagaaggacattccctctctagcttcattcatagcaggtggttttccgatgccttttgttttgtttttaaagcagtggaaggctttcttgagtgaaacctaaaggggacaaaagagtacgcgaaagagatgaaagtggctgtgttgggggagcctgagtcctcccttctccaaccacaggatccctgagagaggtccttcccaaggacggtttggaaaccacaccatcattagtttatctgcagcatacttcttcctggccactctttttataacatgaccttttcccttcccttcctatgtacaggatcttctccctaataccactccccacaatgatgaatgtttgttcttcctctctctgatcacactttcgctgttcccagtggtggcaatacttgtcctgggaggcctgtcccctacactccccagtatagcgatgttgctcttatcatgggtagcatgccaccaggtcaatctttagccttcaatgagcaaattactaggatttcagagcaaagggcaacaagcacataggaaagctcctgatggactctgaggggtgtggatggggtgggggaggtgcacaaccccgaggagtgtgaacttaggatacctcaggcatggggatagtgatggacagaggaagccctctctattgagggaaagaaataaagcctgtctcttgccagcacatatgcgttggagatggaaattaaactgcaaatgatgctggagaaaactgctgacaataatgatgattacagctgttgaagcaataaagctggaaaaaagacaaaaaatgtggtttaacagtgcagaaagaataccagcttcagttacttatatgaactgcttattatttagcctaattactatcattttagcaatcatgcatactattaaatgtatcagatttatttgtgtaaattttatttgattacaatgttagattctgttctttgtcagctgagtcatgatagtctgtacttatgtttactgatcaatcttacattttacttactctttctctgcaagttcataggtttctctttcttttwgatgaatctgacctttctaagattagctagtttgtgtatcttgtcacgctgaaggctgagtgtttggttataaaagactgcttatgttgtcagtagaacaggcaggcattagaagattgcaattctttttctaacttattctgggaagcaggtatttcgatgtaaaatactctagcatgcctgcgtggaggctacagacagctctgcctggttaggatgaagtggggacaggaagagaggccattgtgaaaactcctaaaatatagaatagcaggagcaaagaggctctctagagaggaactgagtgtttttatatgaaattgtggccacatgaaactcagaagactcgaaatgggaaacctcaacatttgttggtttgtattttatgagatgaggtcagagagaagaatttggctggagggcgctccagagcaatttgtacctatttggaagttaacggatgacattaaaactgctaaaagatgatctgtagtttcaatagccttttayatcctgttctaacagtgaagtcattgaagatagcattgctttgaagggatgttagtgatcatgcagctattttaattcagggggagataaagaggcttcttgattcttagttctcttttggggttaacggaagtggttttccattcaagattcattcctgtttcaatggtatacattagaaaagctactagtaagaacacctccagtaatgtcatatatttgttaatttggagaaygagtgcctgttagaccaggaatacctcagaagtggtttttcagttttgtatgccaaggggcctgatatatggtaagtgctcagaatcagtactttgaattatgtttgcaaattccctctcttaagaaatgtcagtaggtaacagtaatagtagctaacatttgttggttgtacctaatgcctgacacggcatatgatccttcacacagatgatttcttggaatggatacaaccaccttgggaggcagacatcactgtcctttttacagaggaggaggctgaggcacagagaggttaaatcattttcccaatagacagaagctaggaatcagttcccagtcaatctgactgcttatttcattgttaagtactgtgccattgtgtcccctgtgttgaaaatgttaaaattaaaaatggtattaaaatatttgaatagttgttaaattgcagtgttaagttataatgacatgcaaacattttccaaataatactaaattattcaatatattacccaaaagcaaaacggtttttaaaaagaatttgattttctttggccgatttaccaaacatagaagggtgaccatatatattatcattgaaactaaaagtgaaagggagcgctattcataattttgtggtggtaacaggagtaaactgtattgtcctggcaactaagatatgccatcaccctgctgattattatttgttctactagatctttgaggcaaaaaatattaaaacaattctttacatttttaatttgtaggaggattcctcaatgtcaatgtaagcgaagtcagttttgatgaaattcatcaactcttctccaaggatttagatattgagccagggggtcattggaggccaaaagactgtaaacccagatggaaggtgaggtaaattcttttcataagcaatttgattgttactgagcatttgaggaaagaatgtgcttgattcagaatacagagacaaatgtctttaagtcttgataaatttaaaacatcaaaagttttgtctttaatgtttactatttataattcaaatgtgatttaagtgttatgtgtgaagactgtaaatgcacctgtgtagatacaaaatagatgctcggttcattctctttgagttcctggtaataaatacgtgacttgagtttggcttggaaaatagatttttttgttgttctgttctgtttggaagagaggctgtgagttccctgcckcctgcagctgtycctaatgattactgacacctgcaagcatagcctcaccagtttctgaattgtgagaactcactgggaggatattaatatcccgattttcagtttgttctggcattggggtcttcaagctctgtttctcagaatccaagattataaagaggctgctcagagatcactgtgggacttgaaaagttggactttgggctcttcttggcttcagaaggcacagcccaagctttctttcagtctttttgatatgtcagaattctattcagtgttttgtttgaaaaactgtaagggggtgggtttgcctctgctgctttaaaaaaattgaaagccataatttaaaccagacttgccctcaaagctgtgaaattggttaacaagtgcatattcatctaatgttactacgtttgagtaagaaataacatttatgtaattccaatgaaaactacaactgataaatcaagtgttatttcctaaaggattgtgatataaccttgatctggaaacagtttatcttttaaaacattagtatacttctagaatatttgtattttcacctccccccacccccaaaaaaaaccactagtaggaaggaaaatcatatgctgttaaactcatgaaaaagaccctctgacttcatctaccatgaactcttcgtgtttgaagatgtgtattatttgtatctgtattcccaacacagagcacattgtcttgtgtaaggtaagcactaaacacagttttgttgaattgactctataaggcaaataaaagcctttttggccttgttacaaatgattcaataaatggtcagctttcttattgccttgaacaagttgtgaagctgcttaaatggattccagtaccaattttagcaaaacatttaattttataattaccttacactatttcccagatcagattcatttaacaaatgaatctcttcatatttcttgattgattttcctcacatttgtagctatatgaaatgcggcccaatttacatacattccaccttttaaaaatagcctgggcacataaattatttttaacacttgggtgctgagtgtgtatattgaatgctaatagaaaaagaagcatactcagtcaccgaggctgtgggatagcatggaggttcatgctcagatagttgtttgtacagaatgtagcacacccctcaggtgtgctctgggtagcatactagtagaacagtttaggataggaaaaatgaagtatttttctcctgtttctagtgatctataccagatggattttaaattttttgtttgttttcttctcattttccaggagacaggtgtatcacatgagtatttcctacttaaagatattagtagactgactrtaaactacatatgattcagtaggtaacagtatggaaaagagttcctgggaacaaactaattcagggatctaaggttcatacctgtaatcccagcactttgggaggctgaggtgggcagatcacttgaggccaggagtttgagaccagcctggccaacatgatgaaacctcatccctactaaaaatacaaaaattagccgggcatggtggaacatgcctgtaatcccagctactccggaggctgaggcgtgagatttgcttgaacctgggatgtggaagctgcagtgagccgagatcgcaccactgcgctctagcctgggtgaaggagcaagctgtctcaaaataaattattttatttaggaactatatgataatgctgcttttatttcaacttttagcaaatccttctcagaatgtagtctctagttcagaattacacaactaaaggtatgaaaggaattttggagatgattcagaagtgagctgtactcatataaatattatataactatcatctcactaaatatttagttaaatggtttctccccctacccgtccctgcctgcttactgataatgttccattctcatattggaacagtggagagagagggaaataagaaataactagatttatgttaaacatctgtcatcaacttgattcttaatatttgaggccccttttttaaatgagaaaaataccaatgcagttagttgatggcaaattaattagaactgagatctttcaaaactagtaattttggctggccaacctgttgagaccccgtctctactaaaaataaaaaaattagccgggcrtggtggtgcaggcttgtaatcccagctactcgggaggctgaggcaggagaattgcttgaacccgggaggcagaggttgcagtgagccaagatcgcgcccactgcgctccagactgggcaacacaaacaaacaaaaaaccactagtaatttcagcaattcctaggtattcttgaatgctgcaggtttaagtagaagatctgcgcaggttggacaccttctggggcaagcttgtatctaaagaagaacatgagaatgctatgcaggtcattaaaagtgaagtgtacctgtgacattgactttccattcagatttcagatggagggcttgatgaacaactttggtctataacttccaggcttaaagaaccaggcagctgcttgatgctcttgtctacccagaggcctggagtttcatttatagtccaatgtacctcaaagatgagtcttggcctccctgtttcagaactacttgaggcatatggtgaaaatgctgatttttggccaggtgtggtagttcaaacccgtaatcccagtgctttgaaagactgtggcagaaggatcacttgagcccaggagtttgaggctgcagtgaggtgtgatcacaccactgtactccagcctgggctatagaatgagacccccatctctaaaagaaaaaaaatgcagattcttgaactcagtcctcaaacattctgattctattggtgggaaggaacaasaacttgcatttttaaccaagtgcctccagtttgagaactgctcctggaggtactggaaatgaggaggaataggaagatgaaactaaaaacactgaaggagaatgagggcttactagcttctgcttactcagtggcagataactagattcaccttaaggttaccaagyctaaagccatgtcatttagggacagtgtagctggtggtgtgctgaaaatttgaaagcaggacagaaacttggtgggagaaattgatgtgatacacatttttcttgatgttctcctcatggtgtatataggagaaaataagcaagggaaaaaatggtgcatatgttcagcaagatttgtggttttaaagtaggagcaaactgaatggaataattttgcttgatcaagaggtggtgaggagagattcaggaggatgaagtgttgttttatcagaagataatgaccagatattctcggtctccactggaggtgtatcagcaagagagtggctcaaacagcaaattagggcacatagaagaatgtcctgaaacaggctattaagccttaaaataaatgatcacagaacactgagatcttttctagacaaaaaaattgtaaactatggaggacattcttccacaaacacaagaactgatgtgccagatgaacttttaagatattgtttagctttattttaataaaagctttgccttagatttatcacatattcacaatatttaataaccctctcattaaaatttggacatctatttgctgttagcacattaggttagcttatttgaatttgccaagacactggtaatttcttttattaccgtctcagtttccttatgagattaaaagaaaaaacacttgatatttaaatacttcattgaagagattattgtattaggagctagaactttactttttatttatccttatatgttcagctcatcactcagtctaattgtctttaattaatatgcactgtctttaattgggactctgcagccatttaataatttcttccctcaaatatctgtaattggccttaactgcttttacagctcattgacattatgtcataggtggccaactcgtggccaaattcaaaatcaagaagggcaggcttgacttactaagctacatgttatcacatggatatgctttagataaggtyagtggtgggatatgtactcaccatctaacctcttttgctccttttacttttcatagcacttttccatcctaaaagtaaacccctgagctagcttcacagttgttttgattcgggaattccttgaatatgccagccattggcgctgaagcccagcagtaagtscccctcagtatatagttccagtacagttggcagccattgtgcgggggcaggaaggaggtcttggatgttgggtcggtattgctggggtagcctcatggtcctcaggcttctgagccaagagagacgttatggggaaaccaaaaaggaatgggaccsaaagttgggctggcaggggcaccagacctctttagttcctaccatttgccagatagatatgctgtgattaattattatcatgaaaacatcagcctcatagcagccattgtctcttgtttttgctatcccatcagcattaagggaaaatgaatgggggagttcatagtttagacatcttcaattttactaaatcattttttgttctctttataaatgaaactttttgaataatttaaaaatttctgccatctatgatcctggtaacgtaaaatacatggttaaatattattttcgtttgatgatatctaatatcatgtcctgattttaaaaggattaggtgcaaaacttaagtattctcaattatttccatttattcatttattaataaactttatttggtataggtaaaattttagtaaatcatggatttaatattctttcacaatattctgttacaaccagtttagattgtatatttaaaaaatccagattatagagtaacacagaggtattttggttagatatactttcactgttgtgtttttttgaaaatctaatgattttggaatttatgatctgtagaaaacttgctttaatttcaattttattagaaaattcacaataataataaagctagctcagctaggaagttgctgagaaaagtaattttgaaaacactttaggtttttcaagggcaaaatctaaattrtaaggagatctagattgtatgacaaagtttgtatccaagaaatagaggatttgaattagtgatgattgatgatcattcatttattcttgtattacactaaaacattttatataaatggtgtttttaagtgttgggtttgagagttccattagattttttatttcatattagaagaaagattaacgtactaagaaactattttcatttccatgtacatgttttttcttttactttttatatgagaacaaatttctctggttgataaagacaaatgtctgtgctgcttacatcatcttttcttgttatggtttgttaccagtttcattttaaactgaatattatcctaccactgaaataaattttaaaatgtatcaaaaacttaattctgcattttgactaaatgaaaaatatattaattatcaaacttcatgtgtattttggggcaatatcatgtatgattgaggttttttgtatgctatggctggagtgtgaagattttggtttctattatatttctgaaaatatctctaggacagagaaaccatgtgtaagatagtagatattcaagtgaaatgtcttttaaattcaattcaaaatccagraagttattatttaggatctactctaaaaccgagacgttactcttatgatacattcccctcccttacttttcatgcccaattgatagccaaaccctgctagcttacctcttagatgtrttgaaaacccatgtacttctcttctcctttatcctcctgttagtttaagctaccattacctgttttctcaacgactgtactaattgcctaactagctccctgagtcaatttttggtcttctccagtctgccctccatattgccaccaaagtagtctttgtagtcaccacatctgatttatcactctcaatttctcatgatgttcataggttaaaggccacaatctttagaaaacgcttcagagccccttctacctctcagctttataagaccatagcagcatgcagcaagggctttttscgtgtttgcttgctgttgtatctctgatgagaaaattcataaggacgtggctttaaaaccatcagaagttttcaaggattgatttttatccttacctctaggatgtggtagatatatttatttacatacatgactattttgttttaaaggtggcagttctcattcctttccgtaatcgccatgaacatcttccaatttttttcttacatctgattccaatgctccagaagcagcggctggaatttgcgttttatgtcattgaacaggtgagaatacttttcatagtggtcactaagtatactagaatctaaactcttagatatggttagattaaacatatttaggattaataaggtaagtctgattcttagtttagtttttttgagacagagtcttgctgtgttgcccaggctggaatgcagtggcgcgatctcggctcactgcaagctccgccccccaggttcacgccattctcctgcctcagcctcccaagtagctgggactacaggcacccgccaccacgcccggctaattttttrtatttttagtagatacagggtttcaccgtgttagccaggatggtcttgatctcctgatctcgtgatccacccccctcggcctcctaaagtgctaggattacaggtatgagccactgtgcccggccaaattcttagttttatacttgggtgaaattacattttggattgggcccatatatttcttttataataattgtaatttggtcaaatgacttaatcagcaatcatgtttcactttagtatgacagcctcgttatattttaatgatattctaaatataggattgtcaatctatggtttttaaaataactgtacagcttatatttaccttacaggattaaatgtgtctttggcttatagtattattactttttatgttttcattaggcttatgatgtttatttttgaaaacctctgtaaagtttcatttaattgagaaactgtttattttctaatttaggctacttggcagcatttagactcatgtacagacatctggactcataactggtacaactcaaagttcttttctaaattataccaaagcaccgtacagttaccttggttatattcgcagtgtttaatttgaaaaaacatttcagtttatgacccatgaatttaactacagaaaaggaaggaaagtttttttctttttttaacacaacagcaaagcatagttaattctcgattgaggatttctttgtactgtggggtagttgctggctatccctgaaaatcaatattggattaactttattaggtaatcagagacacctgaatgacagccagttagtaaacctaaaaacaaaaagtagtatacattaaacattttctgtcctgttttcagtttttcattttcaaagtcatctttcttggtagaggaaccttgactgtttttgttgtaggatatagacccagctctacagttkgtaagtaaatatgcatccattgaactgacaggtcaaaaaaaaaaaaaaaaagcatacattgcatggaagactaaactatgtgatgcccaagatcccttccaaatttgagattctatgattcttttagaagagagaaccaggtggagaatggaattttaaaatattgtcaaaaaagcttattcgttttgtttctgaacagatgctatcaaagctgaataaatcataattctttaacatagttaatttaaatagagttgaaatgaccttgacttactttttgtagtctttgtttaaaggctataaagtgtaaatataaagaatttggcctggcatggtggctcacacctgtaatcccagcactttgggaggctgatgtgggtggatcacatggtcaggagttcaagaccagcctggccaagatggtgaaacctcgtctctactaaaaatacaaaaattagccgggcatggtggcaggcacctgtaatcccagctacttgggaagctgaggcagggaagtgcttgaacctgggagatggaggttgcagtgagccaagattgcgccactgcgcttcagcctgggcggcagagcgagactgtatctcaaaaaataaaaataaaaataaaaataaattgaaaaaaagaatttaattttctacattatttctaaacatggatagagtgatgttttggaaacctaaaaaagatctgataacacttaaagaccagttctccatagcagcttgtatcacttttggtattgtcacctcatatttaagtgtatgtgatagatggtaattttctgttaatgtatactgacctttccaattgctttacatcattgccagcacttggtatggtttgtctttttaattttagccatttagtgggtctgtggtagtatcttatttccctgatgattaatgttgatgatcttttcatgcacttatttgcttcccacataccttctatggtgaagtttctgttcagatctttttctcatattttaattgggttgtctttgtttttactgagttgtaagaattatttatgtattttaaatacaagtcttttgtaagacataagttttgcaaatatagtctatggcttgcctttttattcttttgactgttttttgaaaagttttaaattttgatgaagtccaatgtattgatttttgtttttatagcttgggctttttgtattatatttgagaaattgttctgtatgattttctctttcttccagaarcttaatagttttagctcttacacttaggctaatcattgagttaatctttagatatgatatgagctaagagtgaagtttcgtttagttgtttcatcaccacttgttgcaaagactgttttcgccattgaattgctttagcatctttgttgaaaatcacttaatatatacacgtcatatgtatgcaggtctttttctggtctctgtgttccattgactctgcttgtcagtttctactaaaaggtctgctaggctttatttccttagttttgaataggtaagtaacagtataaatgatagacaaagttacctggcttgtattattagatacttttatcttctctcttttggtagaaaatactcaaaaaagtttttttttgagacagagtctgcctctgtcgcccaggctggagtgcgatagcacgatctcagctcactgcaacttctgcctcccaggttcaagcgattctcctgtctcagcctctcgagtagctggaattacaggcacccaccatcatgcctggcttatttttggaaaatactcaaatttttattcctaaaatggttatagtttctccagttcctttattctaaatctgcctttttgttttgttttgttttttgttttgtttctcactctcagctttttacctctgctttttctccgtggaaatgcttggtatttaatataacataccatacttctgtgtgtataaatcattctttaagttttgtgccttatgtactttttaatgtaacaatctgtactgtgaaatctgacttgttttacytaacaagtggaaattctcatctactttcatggagctgtagttgtagatttctagatcagttttactgatctaggaaagtgctagtttcctttgtgtaaacttcaattccccataatgtgtggagaggtgagagagctgtctctggttttttttttktttgtttgtttgtttgttttgtgatggagtctcgctctgtcgccaggctggagtgcagtggcgtgatctcggctcactgcaacctctgcctcctgggttcaagtgattctcgtgcctcagcctcccgagtaactgggattacaggcatgtgccaccacacccagctaatttttgtatttttagtagagacagggttggccaggatggtctcgatctcctgaccttgtgatccaccctcctcggcctcccaaagtgctgggactacaggcatgagtcactgcagcctgtctctgtttttaaaggcatatggtcctgagaattcagcaccagttatttggtgtatgtgatgaaacaatctttgcaaggcaactaaggtctgcgtttttattttcaaaccttttaagtcttaatctcaggcttgatcaatattaattcaggactgtgtatttgatagagtgagattttgagctagaaacatcttcaccatatttgaaatagaaaagtaatttttctgctagacaggtacccagggagtgctaagcagttgaagagcagctcaggaattctagttaaatrtagaggatggacatgggttcactgcttctttccaaactcctaaaatgagagtgaaagaagaaaacttttgaaaagttattaaacctcaaggacagaaagtcgtgggtgagagattttcacacgtttcggttaagtcaggaagcagatggagtgctgatgcctagcagaacagaggatgtgcaaacccacatgcttgtagagggtgatgtgacaagactagagtcaatttgctggacacacctctgtctcagtgctgtcacagaaggtaggctgaagcactgcactaaagtaaggagattgtttaaaagtttgactacaaaacagccacattcccagttgctcatctttacttgtactgccaggtcattactctgttgtatcttgtagaaactttttccagtttatcctgtggaaaaagtgtagcaggaagctgctgagagtgctgacgcacctgtgtggtagggcataaaaccggggggttgagtaaatctgcatgctgaccctagggaccccaggcctttycccgtctggccttttgaagccaacagccaggtgtgaatctccccacccctccagctgtggcagggcatagtggtgtcttcgctagagaaatgaattatctccaggaaaaagagtccagatctgatatttgaaggtctccaaaagaaaaggccagcctgtcactttatcaggtccctgcagcccggtttcatttattcaacaaaagggatgtggcagtgaacaaaccagacaagtccccttcttttgctggcccagaaggaccggcagtagtaaatcattctgcagtgtctccatggcactcagggtagagagtggtaagggcaggtagtggtgctcttttctgcagagcatttggggaaggcctctctggggaggtgagatcagagcatcctggaatgatgtaaaggagcacgccatgctgttgtagaggctgtgcactctggagaaggcaggagaatacttggtgtgtttgagcaaagaggtcgatgttgccagagcagccggctgaggaacattctggggaggaaatcagagaagcaaataaggaagtgcagggtgagggcttggattatcctgtgttaggtagattaagtcactcttctacataaaaccttcagatgacactggataaagtgatgttttagaaaccgaaagaaggtctgataacacttgaagaccagttctccatgccagcttgtaccacttttggtattgttacctcatatttcacatttaaatgtatgtgataggtggtagttttatattaatgtatgctgacctaatgtaagtctctcctccgcttaaaaccccccactgccttctggaggttcttaagtagaggagcaacttwatcgctggtgtgttcctctcgacgtccacctgcttgtgtctcttcctgccaggatctcagggctttcataggcaaaggatgagggatactgggaattctaggaaaaatgaccmatgattatgaatcagaaacctatgaacattctcagcaatactgggaaatttttttttcctggaattttttacccagccaaattgacaaatgtgagagtagactaatggcattttcagtccttaattggctaaaagtgtattctccatgggtctttacttagcaagctcttgaagaatgtgcctcaggaaattgagaaagccaaggaaaaggcgtaggtgatttagrgaatgaagacgacccaggtgatatgcacacatggtctggagagggcaagggagagttgggcttgagagatggagaaagaattgatagatgatttgatgtgtttgaatgattacatcaattattaataggtgtagggcatatttcttgggccttcagtacaaagtaataatataatagttatatagaaaactgtagttaytcccagtttgcaaaagaaaacagttcactcagcactgaagaaatattaaatatttacatagtcctaataatgtaaagtcttgatttaaccaaaaattatgataaaactatattgggagaatagaggtaggggcaggaggtgtggtggtttaactcctccactaccatgataagaagtcaagagacagtgtcttaaagtgaaagaagcaagaaatatcagaactctcatttcctcaaaatatgtagataaataccggaataaatgggaagagttgaaatgtattgctcttggatggagatggattagatatggaacttcttatttcttttataagcctttgagtattatgtccacatttaataaaacatttaataaaaacaatttttaaaaccttaaaagtagtttgttaaagctgatgttgatgtactagtcataacattataatttaactcccttttctttttattttatttcactggtgaaaaaagaggctgtaaaaaataaaatgacttctattacctcaagttagtgcaaggcctaggactaaaaattagtaatttttcactcttgaggcagtgctctgatgatgactacaatgtgtgtctcatttacttctatcgtaatcctttttttaatatattttagaaatggttttgttaaatgttgctaaaacactggtaaatgctctttaattttctttatatgcagaatgaaggttttttattgccagtgcaccttaatatatgttcactgataaataaaggaaaatggttataatatagggagttgggttctgtgtaataaaattgtattttttgtcccttaaaaatgcccttaatctttatcataagcaataatagaaactattgcccatgtactttaatgtattttctgtaataataaaggaaaatggttgtaataaaggaagttgggctttgtgtagtaagttccaattgttttttgtctaaaatgttcttggtatttattataagcattaataatagaaagttagacctccttggtattggtactttagagaagggtcactgttgagtcacttccagtttcctcttctcttagtcttgacagcatatggaaagctccactaacaaaataaaacttatattatttttaatgactttttttttctcgccacaagtaatctatatcctgatgtatttgaagtagagcagaaatacaaattatttaaatgtgctgatgtaccaatggactagatactgttttcttctatgttattaaattataaaataatatagtaagtaaatttaaacagtgtatttgaaaatcctgaagtatatttattatttgtctatttcatttgggtctaattattgtaatcatttgatcatgatgcaacaagtttgaaaaataatagaaaaaagtcagatgrgggccgggcgcggtggctcacacctgcaatcccagcaccttgggaggctgaggtgggtggatcacgaggtcagtagttcgagaccagcctggccaacatggtgaaaccccatctctactaaaaataccaaaaaaaagaaaaaaaaaaaaaaagatgatgaagtgtgagtacatttctatttttttctctcggtctgctccatgaagactggcacacaaccttttaaccgtgcgatgcttttcaatgtgggcttcaaagaggccatgaaagacagtgtctgggactgtgtaatcttccacgatgtggatcatctacctgaaaatgaccggaactattacggatgtggagaaatgccacgtcattttgctgcaaagctggataaatacatgtatatgtaagtagtgtgcactattcctgatattgtacgatataattgcacagtcatagcattgaaatggtagcagcgttatgtccctaaatctgagagaactcaagaaccccaagaatatcatctttaactccatcgtgtcctcctggggagccaggacacagagtggcttttcgttcccctgggtgcttccttacacagaggtttgaatgtggtgtggtgggaaagagagcctggtttctgtggtcaagcacacacagatttaaacttgggttctcacacttacagttccaggacttataggttagtcacttgcatctctgaaggtgtattccttgttcactgggataatagattccatccatagagctgctgtgagatcacatgtgctctgtgcctgctgtgtggtaggtgcataactcatcttgactcctgcctgctctcccccagtgatggtttggagggccacaaagccctctcttctgctgtttatcttcttcctaaggtgtgcattcttgacctgccctttaataataaaaaaaaaaaacccaaatcttttccttctctaattggagataatttaaaatgaacagttatcagagctgagatagtaacttaaaaggacatgaaagaatgcaagtctaatatgggaaaaggatcacagttttcattggcctaatgggagtagagagaaaatctgtttgttgcttagggcaggaagatgttgcctgtgtcacagttttgcctggtgctaatctagagtacagagaagcaaaaagtctgacacaagcaggaaaagaatgcttgtttctttcttcttcttcctcttcctcctccccactcctcctccccactcccgctcccctccttccccctccccgcttccgctccccttcttccccctccccccttcttcctcttccttccttccttcctgcttctccttctccacctcatccttctcctcctccttccttttttttkgctggtcatkgttatcattagaaaacctttttctttattacctctgtatctgaactttgagtatggggttaccttgaagaaggccatcaaggttcacaatctggttctctttttcttttttttttttttttgagacagagtctcgctttgtcgcccatgctggagtgcagtggtgcgatctcggctcactgcaagctctgcctcccgggttcacgccattctcctgcctcagcttcccgagtagctgggactacaggcgcctgccaccacgcctggctaatttttttgtatttttagtagagacggggtttcactgtgttagccaagatagtcttgatctcctgaccttgtgatccacccgcctcggcctcccaaagtgctgggattacaggcatgagccaccgtgcccggcaacaatctggttcttaccacttctggaaacttgatttcagtcagtttgctagaatcacattagatccagggtaaccgattttcacaaaaaaaaaaaaaaaaaaaaaaaaaaaaaaaaaaaatcataaagggcatataaactaagaattctaaattaatttattgttaaattctaaatgaatttgttgtctaaataatttgttgttaacttgaaaatatcaatttctaataaaatacagttgacccttgagtaatgcaggggttacagtggtgaccacctcccccagccacyggaatgcagttgaaaatctagtataacttttgactccccaaaagcttaactactaatagcctactgttagccaaaagccttaccaataatataaacaattgagtaacacatattttgtatgttatatgtattgtataccatattcttaccataaagtaagctagagaaaagatgttattaagaaaatcataagggagggaaaatatatttactgtccattaagtggaagtggatcatcctgaaggtcttcatcctcatcgtcctcacgtggagtaggctaaggaagaggagggattggtcttggggtctcaagggtggcaaggtgaaagaattgaagatggaaaaggaggcaggagaggcacattctatgtaacttttattgaaaaagaaattgtatatcagtggacttgtgcagctcaaacctgtgttgttcaagcgtcagctgtattcatatccatctagactagtccctggattggttaggcatcttggacgtttgtagagaaattagaatgtagctctaggagaatggcagtagatcaaggcctggtctgggcagtgcatagacttcagctgtgggatgaagcctggtgaagcgtccctgccccacagtgatggccacactactgctgaccagagaactcagactctcaggtgtagtgtctctcccacttttacagtgtaagataaacactgcaagagtttgacttgttgggttttgttttctcttctttagtttatctgttataccttcattttacctaataactttccattattcatatagcacaattgattatttccacttagagcaataaatggaattgataggcttgctgatttatacatgtcaataagcacacagacacatttattcatgtttccctatctgacgatctcaggtttttcctaaactactagcctgggcaagaataatccatctgatgtgggaagtacacggtgccaagaatgcttattggccctgtggaacccccagctagtcttactgtaataccagaacactaagctcccaagtgtgagccttgagaggtctcaggagagtatggttgtctttaggatcagtgttgctgttaccatcttggagtacctttgacctaggatgagggcaagactgctttctcctacaaccctaggcttccatgaaagaaccagtcttccctggtctgtgtgccacacaagaccccagctggcaaacagcacgtccttctcagaatgtgaggcgagtgtctaacaaaaagttccctcctctgagacagctttgctgtggttgcagccaggtttccctcagcttgatttttgggtgctgtgcatggtcacgttttctctgctctggcatctgctccccaggggcgtgtttcagtccatgggaatatattcaggattgcaggtctagggatgctgcctaaatgtcagaaagccaatctatacctaaacacacagtttagctaagtaaaaatatagtttagaaaagtttaaaaacattgcatcgtttgacacattccttggagtatgagttaggaaagggtaaggaaaataaaatccaaacaaaaatagttatttctrtaaatatcaatgcattgaaaatgaatatatttgtaaatatccatgaatattttgagagtataattccaacagataagatcattataaaagtaggtagctagacaattaaatgctagaattgtcttttgtaattgatatttatcctgctctatataataaataatgcgtttataattcagttaattttttcagtgttactagtttaggaacatctgacatgcattgaccattataaatatatttaatcatgtttacttttgctgtgaaaatatacaatttgggggcactgggttttgagccttacagattttattttgagtcttatttgtatactaaatattaaatttaggtttccataagtgctttacatttaacataacacatgtacatgtacttgtttcactagaatataaaaatgttttatgtcttgstgtactttacattttctaacataattgtctatatagaatataagggcatattttgcaaagcacataaaagrctgaaaccttcatttcacatgggaaattattatgattttatttttagaatactgtgtctttcttttctagtcttccatataaagaattttttggtggtgtaagtgggctgacagtggaacaatttagaaagatcaatggttttcctaatgccttctggggatggggaggagaagatgatgacctttggaacaggtatgttgaggtacaaattgttcactaatagaatttttataaatcttatttatattaggtaaattgtagtacttatccattccaagaacattctttgggatgggatatgtttgaggtttctaaaccctrttttatatttctctttttttttcattaagtctgctttctgaaattattggcagcatataattagagcagcggtccccaacttttttggcaccagggaccagtctcctggaagataatttttccaaggacccaggaggatggtttcgggaggaaaccattccacctcagatcatcaggcattagattctcataaggagcatacaacctagatccctcacatgtgcagtttacaatagggtttgtgttcctctgaaaatctaatgccattcgctgatccgacaggaggtggagctcaagcagtaatgatcgctcacctcctgctgtgcggcccagtttttaacaggccatggacctatactggtttgtgrcccaggggttggggaaccctggattagagcattcttttgtgttttaaaattgaactcacataacccattttcatattttatttctctatattttcatttccatatatggcattgtagagttcactatgctggatataatgtaaccagaccagagggagacttaggaaaatacaagtcaattcctcatcaccatagaggtgaagtccagtttttaggacggtaagttgaatgtcatcttcagataccaaggtttccaaagctgttgaataaatgaaaggtaaataaaaatgcattgaaccccaaaaaagctgctgaagggaattttcataatggaagggaagtaytttttgctgaagggaatctttacaaaaggaagcatttttgatgcttgtttttaagagatatacgtatatatacattaataaatacacatatttacgttaaagagcccggttaactatttatgtaaaagtatttacgtaacataaagcataatgttttatttattaaakatgtctaattgtaaaagtgcaaaataattttttcaggtggcatttcttgagtagtaaaattgctaatttagaataatggtttagagattcttaaattatgcacaagaaccagaaattgtaaagggcattaagtgctttaattataagatgaccttgaacacagtccttatcagttttcctttttgaacatgtttygttgcttttttgttttttcctctaaaactataggtataaattactaaggtattccaaggagcgtcagtacatcgatggactgaacaatttaatatataggccaaaaatactggttgataggttgtatacaaacatatctgtaaacctcatgccagagttagctccartcgaagactattaaaagaagtggctgtcgtggcaaggtagaccacaatgctggatcataaacttggagcgcgctcttagtggaggtcagtgattggctgtgtcacagtgcccttttctctgagaagagccagcagtccacagtgtttacagagtgggactatatacagtcacccttctctcacccgtcctccctgctctgagacacacccctgtggcgagcaccgcagaaaygggaagccactacttaagatcggaagttaagagagctccctccgaagagaaaatttttatactaaaatctataatttaattcaagmgaatgcttttatttccgtttaaacatattttgtatatatgtgatataaattaatgtgtgcaaattgtttaaaaattagatgtgttgcagttttgcatgtaatcggttatacctttattggacttttatagacattttttatttgcatgaaaaaaactcactaaatttacatcactaaacaaaggttaacccttgtgtgaaatgaaggaactgtcaataattgacagccaactaatacagtaaactgttatactagttttgagctttagacctcagccttttgtgtggaagaagtcacagctttcttaggctttaaaggaaaagaaggaaggacttaaatagcttttcttcctaccgggattacctatgtttttccttgcttgcaatctcatctgattttgctagaaatcacaaccatattgtttatgcatattgcatgagtattaccaagaaaaatcttaaaagttgtgatgtgacatgatataaaggatctctttatgttaaatgtctttccatgtacctctggtgtgtcagggattttgtgcctcaaaaaatgtttccaaggttgtgtgtttatactgtgtattttttttaaattcacggtgaacagcacttttattatttccagttcagaagagccaaaaaaaagtatcttcatttaaaaagaaatcaagtcagtttttttaaaagaatgatctatggaagaaaacccaatagtacttataatatacaaatgaattatactattagataagaattaaatattctatttttataaagataaatacttagtagataaaaacaaattttaagtttagttttcagacatagaatttcacttttggaggggacccttgaatgttagtttcattcaaactatattttgtttttttcacttttaagagattatatctctggtgttaattactaaaattttctttctaaaagtataatttaatagaattatcttaaaatacatgatcagtattcagtgcgctgatattataatgtcttctatatgtagtatctaaaagcataatttaatagcattgtcttaaaatacrtgatgagttatttggtgcactgatgccataatgtcttctatatgtaatatcttacatgtttgcatgagtgtcagggctttgtccagttatcttcatatgactgttctctgaraaaaggtcttactacctgatatcaagtacatatcttaattttggatgaatttttccacagtaaagccgaacagtattcttttttgaaaattagcaattataaagattgtttaaaatatcttgatattttcacaaattttaaacaaaaaattaaatatctataaagtgaatgttcaacaacaatgatgagcaatagaaatctatatatgagaaacgtttggataatatttgcctcaaggattgtttacctaaaacagaactatggttatttatctcagattgtaagttttattttgaagtgtcatttttatggcaatattgataacacaaatgaccacaaactaaatcataaaataattgaatccttacactttgagaaaatggatagcttctgtgttatgataccaaacaaaatattttcatatttatttcttagaactatttccaaaatatttatatttcagtttttttatggtactcgaaaaatcaaaccttctgaaaattatgatatttgtacttcatttgtgtattagttcattttctgtttctattacatagtttttmaagtcaatgaaagagattgagaatgttaacatttgttgatcaatgtggagctgtccacattcggtatcttttcatttttatatatattttacagtttcaagaaaacttagtactactagtatctgccttattttcttaagtytgatgttaatttttgtttcaggagtgagatataaacattttgctttttttcagttttgaaatatagtttgtcatcctgtgaaaaccacctcgtttgctttttgtttgtttgttttgcttttttagtgtagacctaaaattatttttgcctataaacagtgaacttaatatgtttctgtgagagtgacagagctgtgcccgtttatcttcattgtattaattattacataaagattaacaaatacattgcaaatgcaaattataggatgtttggaggatttattaatgagcatgtattgattgcctattccatatccagtgcaatgctaggtatgtctatggaaggagtattattacttcatttctaaacaaatgaagtcaagcaaattgagatctttctgaaattatgaagacatcttctgataacttatctgttgtatttcctagtctcaaagtcaagaaacccgtatatgtggacctagggctaataggaggtccctatggcactaactgggaaaattacatggtgcttttcaactacagaaagaagtaatgactaatgggcctgtctgtagagaagaaaaggagaagagtacacatttgctggaactatatataattcacagtggagatagttaattctttgctaaaactagggttttatgagtattttttaaatctacatttaagtttttgtttttgtgaaaagttattcagtaagaaaactttataatattaagtagatacagttatgtattaaaaatttccttatatacccttttgccagccaagatactgatattttaaaacaaaatggaaaaatgtccaatacaatattctctttctggaggcttcctacaagtgaaagcagattttgtcattttatttggcctttgcttgtctttgatatatttctttatgtgtttttcaaatacatactgttgtagatttattgtcttgtatttgcaagtatgccggttgagagaactaaaatggttatagtattgtttatcagaaagaggaagtgtacttaagattattttatttatttagatgaaaggcttctacataaatgcactgaaataaatgctagtaatttcttgtatcccacttctttttttgcttctcatggaaatgtttgtacttttttatcattgtcttttatgaaatataatgttctaaagactttgtgtgaagatgtaattattttcctctcaggaacttttttgggttacctgggatttttgtttgtttgttatcctaaattttaaatgaattattgatgaatatcttggttgacaatagggttgcaatataagcataaggtaaccacagcttaaatacaggtggagatcaccttattccttttatctcaaaaagtagtatttaagtatttttcattagtacaacaattagtaatctattatatcaagataaatatttaagaattcattttagcataaattttctttttcctgcacaacttcaataaactaagctggtgtgttatgctcaatttactacttgtttttcaggtatcgatgatttttaaggcaaagagccaaatttcaaaaatacctagggactagatttgtatttgagactagattgtaagatcatgagttttatcaacttactagttgtgaaatgagttgtaattactctatgtataatatgatctatagggatattgtcactgcatgtcataactaaaaccaatcattaaaatcataatcatttaaagccgtgaaatttagtcagcttagtctgccccactatggtactaatgtgccctctggtgaaaacatagtaactccatttaatgatcatatatatatgtgtgtgtgtgtgtatgtgtgtgtatatatgatcatatatacctgatattctatatacacacacacactgtacacacacacactttttgtgctatctttagacaaagatttaaggtggttgggtatgttctggaccaaaattttatttagagaagtctgttcttaaggagcatgtactgtattgctcttgatttaagcgacttcagaaaagtgatttgccgctcaactatgcaatgaaaaggaaaaaaaaacggtgtgaaaaataaaacttgcatctttctcaacacattccgctaacagattttggttgcatgcccttgctaatacagtcttcccaattttatcagtttaagtatgtgctctggaggatcttgagaggtatcagacattacctaccctcaaggagtttacatcctctctgtgtaaaactgatgtagcagaaatacctgaagaatcacatgctatcaaatgaggggctcatttctgtcctttgcaaacgttgattgtctgtttaactaattgagcatctttgcaggagcagcttttctccagcacgtatttctcagctgtaaacatgtacttcagaaggagatgttgagataattgttcttctgcaatagaccttaaaaatttgcttaaggattttgcataaggtgggctctgtggaaggtgggggttataagcaaatagtgtagaatttttacttataacttagactgatctgagtttgaatccaggggtcctctgccattatctgtgaaacattaacacattttcaaacgtctgttgtcctcagtttcctgttctctcagtcaaggatgatgttctacctgaggataattgaaatgattaaaaataagccaactgtagtagagcactgagtgccactgtgtcagtacctgacacagggaacaaaaacttggctcatattaagtcagtttttcagctttagattaacaagcttttctttcatgcacattcttggcttatatttaaagaatgatactgcattctttaattcaaatagaaaatgaagtcagtgattaccctacatgtgatcatgtatgtgaacaattagtaaaactggcaaaagtgtacaattgaaattcgtcggccaggcgcaaagtatgcaattgaaatttgtcgcctgggcacagtggctgacgcctgtaatcccagcactttgggaggccgaggcgggcggatcatgagttcaggagatgggagaccatcctggctaacacggtgaaaccctgtctctactaaaaatacgaaatattacccgggcgtggtggcgggcgcctgtggtcccagctactcgggaggctgaggcaggagaatggcgtgaacccgggaggcggagcatgcagtgagcggagatcgcgccactgcactccagcctgggcgacagagcgagactccatctcaaaaaaaaaaaaaaatttgtcagtcataagaagaaatgtagcaaataggaatcagggtccctttcctcactgggttgtgtggttttagatggcatgggaagcacacattacaatatgtagttcatggacggcatttagtaactcagcttctcccagtatcataccggaggaagtcaaatatccccgatgtgccggagtccctgctctctctctctccaaccttggcttttgggtttggcttttcacacatatctgcagtttccttggaaggtccttcctctgccttccactcgccctttctatcaatactcacttttaatagtgtccaacagaacgttttgtgatgatgaagatgttttacgtccatgctgtccgatgtagtagtcactagccacatgtggctctcaagcatttgagatgtcagtagtaagtgcaaggaactcaatttttgatattgttaaattttaatcagtcaaatgcagcaggtaatctcttacacttctagagctttaaatccatggacccactagatatatacaggaaattcccaagcccttatctccagcttggaattattattagcatctgactcattatcaatttattggtcatccccacctgtttgttcacagaaactttaattcaccaggtccttaggtaaatgtatcaaatccctcttcaaaacctagtcttttcctgtattcccatccccttagcaagtcaaggcatgaatctgagtcatcctccctttttctcctccccacagtcaacattaccttttaattctgtcttcaatctgccagggtcttttgtttcttcaacaactgcccaaaccttccccccacctttttttttttgagatagggtctcaccatattgcccaagctggactcaatctcctggactcaagtgatccacctacctcactccatcttttctcactgcaagggtatatcttcttctttgactccattttccatgttgccacagaaattgtctcttttgaaatgccaccttgctgaaaatcttcctggggcttcccaccgcctacagataaggtccaagtgtttctgcttctcataccaggctcttcatgatctgaattctccttgcctctccaagacggatatctcatctctcactcctgttccattctttccattccttagctacctatgagctgctccgattggcctcttaaccgttgcctttgtacacaatctttcctatcttatccaccagagaatctggtggatctggctctcttgcccaggctggagtgcagtgctaccatcttggctcactgcaacctcctcctcctgggttcaagcgattctcctgcttcagcctcctaagtagctgggattacaggcacatgccaccgcacccagttaatttttttttttttttttgtagagaaagagtttcactatgttgcccaggctggtctcaaactcctcagctcaagtgattgcctgcctcggcctcccaaagtgctaggattacatgtgtaagccaccgaccttggcctacatacctctttgactcaataagctcctctggaagccttctctggccaaccagtttgcccctcactcctttcacctctgcctacagtacctaaactctattaaaagcatggcttatactgttgcatgtgtttgattaacaaattttctttcctcccaaagactgctaactatctgagagtagcagtgtcttatttttttttgtacttctagcatctggcatagtgctcaatgaatgagtgagtctgtcaggggaacactttgccatctaattagggaagaactaaacggcattctaaattactgttctattaaaacatatacctcatcaggagatcgagaccatcctaggtaacacggtgaaaccctgtctctactaaaaatacaaaaaattagccgggcgtggtggcaggcgcctgtagtcccagctacttgggaggctgaggcaggagaatggcgggaacctgggaggtggagcttgcattgagccaagatcgcgccactgcactccagcctgggcgacagagcgagactctgtctcaaaaaaaaaaaaaaaaaaaaaaagaaaacagaaaacatatacctcatacttgattgtgttaggtaggatcagtgccttcattaggactattaaggtccattgtcaaaatgtgtgacacacctatgaatgtatctgaatagagagcccggctcttttatactcaatattttttttaaattaaaaggtatcttctaagtcagttaatacaggttagtatgtaagagaaaaaatagcaattcattgccaagatcatttttattgtttttttaaaaaaccgtgaaaagtgaagtcgcccttcccacaaaatatacagtgttatatgaccctaatattttgatgaaagattaaagaatgatactgcattctttaattcaactagaaaatgaagtcagtgattaccctatgtgtgatcatgtatgtgaacaattagtaaaactggcaaaagtgtacaattgaaatttgtcagtaatagtcataagaagaaatgtagcaaataggaatcagggtccctttcctcacagggttgtgtgattttagatgacatggaaagcacatcagagcagactgtgaaaacacctaatttggcttatgaaagagaaagtgttaatttatctctggagcgtaattttcatctgaggtagttttagcaatgtatctagttaatttccaaggattattagatgttcttgacacagttctcccccgctttccacccctctgttgcctgcttttccttctcccttctcttccaccaccgtctttgtcagaatcaggaacaatcatgatggttattaattcttcgttaaatcctgttgagtgtttttgtttcagcagaacagggtcactatggtaactagattccccttttattatactctttttcccttgcccttggtatgaatgtcattttgcatagggtaattatgcagtcttttagcctgtttagcaactcgggtagccttgtctttattctctctaacaccaataattttttgtcatttattaacacaccatgtctcagcattgtgcttagtgctgggggaatgggggtaaattagatacaattttttccaagcagcccataaccaagaaagggagctgcttgccatgggcttctcaaaagggccaacccccttttcctctaaaattttacagcctacttgtaaacctgatggaaaattgggcaaaagtcttggacaagtcccataaaagaaggaaagcttccagagttctaccttaggctgtgtaagggaggggcctcgtctggttaccgcagagagggtgtgagtgaggatgggaaacagattgtccacagcagtgctggttggggcagacgaggggcatagcttctttgctggtgcccctctggagagcagacaggtatggataaaagggatgctcttcactattcacaatagcaaagacttggaagcaacccaggtgcccatcagtgatagattggataaagaatatgtggcacatatataccatggaatactacgcagccataaaacagagtgagttcatgtcctttgcagggacaaggatgaagctggaaaccattctcagcaaactaacagaggaacagaaaactaaacactgcagtggaagttgaacaatgagaacacatggacacagggaggggaacaacacacacttgggcctgttggggggtggggttgggggatgagaggaagggagagcattagaacaaatacctaatgcatgcagggcttaaaacctagatgacaggttgataggtgcagcaaaccaccatggcacagttatacctatgtaacaaacctgcacgttctgcacatgtattctataacttaaaatatgtatatat

SEQ ID NO: 95277 - DNA, 21334 bp, Homo sapiens
cactgctcctccatcacagccgcccttcctgctgtcccactctggccacccaggaggcccccaagccccaccccaccgtctgtgtctggcaggcatcgctgaccatataaggtgcctctggcctccctgcccagcccttcagtgctcccagctccctggtgccctgggaggcggccccctagcytggggtcttggtggcgaaggtcaggtagccggtgtggcccmcggcctccttcatgggcgtgccgctgcggaaggggctggtgtcggagccggcagggccatctgtgcctgtgcccaggtcgggcggtggcaggctgacagtgcgcacgttgtagacctgtggcagcacctccagggtgctcagctctgagaagccgcgcgctgccagcgcctggcatgtgcgttgcacctgctcgatgcacggtgagaaggagcagaagcgcccgcctgtgggaaacaggacccgagggtcagagggcaggggtggcagagcctggcccgtctggccctagcatccctggactcccaccctagggtctgaggccagcctaagacagccccaacacagactgcaagctctccaagagctgggactgcagggcagaggggcctggccctcaactgacagccccccatggggcctggcgccgctgttcatgtcacccagcttagccatgccaggccctcccatgtgccaggcaccgggtcaagcccgcgctgccattgtctcacttggcccacagcgggcactgctctcctgccttccacagggctgctggagctctgggcccggagcagctctgacagcacggcagmgtggggcggtgcgggggccgctgctgtcacaggaaattagaggctgtcgctgctcccgggaacaggaggcgcctactcgaagcagagcccgagcatgacagcccctccctgccgcctcccaccagggcagccacgggcttcactcggcctggcctgcagtgaatgagaacccagcccgggtccctgtcctggcagggaggacctggggaagccagggccgggtagaggtatgtggcccaggcaagtgtcctcaaacgtccctgaggcttggtctcctcagctgtaccctaacacggggccgccaggaggttcggggttagaggaggcacctgctgtgtgacaacagcctagacagggcacagaggctgagcatgccgcatcctccccagcgggctcccgtggccggcaggagatgccgggcccatgaatgagccaggagcctttggacccagaagggggagctcgcagggaaagggacaggtcccagaggcaggcgcgggttccccgagccacgctggaggaaggagtcacaaaggcagcaggggggccccaggggaggctctgccgggttcagcctccctgggactatggtccaggcccagaagtgtccccagagcaggaagcctaggaggcagggtgtggagatccccacagctacccacctcagcagagaccaggacccaggagtcagggctgggctggagccagcaggggacccccggccacagccttgctgttcgcaccaggcctcggctcatctttgaggtggggtggggcgcccagcacctccacccttcaaccctctcagaatacaactctcagctgggaagaaggaaggggcccctgctgcctgagctgctccttctccagaaaagggaaaaaccctgggcctcccagccacctccctggcttgaggcccgaccttccccagggctgccccgcctccgcacccagcatcttccctaaaaggggccagctccctgggctccagagcctgggggaggagaggctttgggaaacagcagggaggggactccagacycctccggccgggcctgccctgcacttgggtggcgctgccaccttcctccatcagggggttgggagaggccagagaccaggagcagggcccagccagggaccatcatccccagctctgcctcccctggcgagcctgacccactcctcacctcaggccaaagtggggccctggcctggccactgccatggtgtggcttggtctctggacccctctgagatcccaggagctcagtcctgcacccttgccccacccccacccaggctgtacctctcccggaaccccggatgcaccttcgaccttgagggcgtcccaggcgtggcccacggcctcccagggtgatgggatgtccaggaagacggcgtcggccacgtggctcacgccaaagccactgcggcacacgtcctgggtgcgcacagtcacccagcggcccacacggtgctcctggaactcctcccgggccttctctgcccgctgctggtggaactccaccgtgtgcaggtgacccgtgggtgcaatggtgcggatgatggcgtgggacacagagccactgccggtgcctggcaggwcaagaagggatgggcaaggcatcagttgggactgctcgggacccacagcctcccaggaaacaacccccacctcaccctggagacccacacagggcttgggaggaccccaagctacaggtgggcgtcattccagggctgtatggtcctggctgcctaaagccccaggctagccctgggttgggcaccctgtctaggggtgagctggggttgacaggctgtgtatgccgtgctgtctgttgtgggcacaggcgaggccagtggcaaccctgccctatcctgcctagcgcaggtatagggaatgagagcagcccagctgcctggagcctccggggaaatctgtgcaagggggacagggaggccatcccatcactcagccctgtcttattccatgcatggcccatcacttcctcaatccccgtcaacagtggcccaccctgccggtcctcatgcccacctctccccagaagctccttggtccccttgagacagcccacccccaccaagcctgcccaaacctgcccccaccacacaggggctggggctctgccctggcctggttggactcaggacgcagggcctggccaccagccacacggccccagtcctccccagcgcacctgcccccagcttccctccccagcttccctcaagatggcccctctgcttgacttcctgtcttatggagagggtcaaggcttgcatccctcctcccactccagcttcaggggccatctacctgatgccactcccatccccaggcccctccactggagactcctgctagagcagccactgcacacttgccacccatgcctggaacccaaatagcgctgagcatcgcaagtgcttgggccagacccatggaggtgcctccactccctctatcccgtcccacgtcctgccacctcccacattcctttcaggggccagcccctctccccacctgtccagcccctcccctgggtgcccccagcctgctgcctcgcccctctgcaaagcctggccatgcccccttcccactaaggggcaagtcagacttgttagcctccggggtggagctcgcttcccctccaacctcactcccagcccctctgcctcccccactgagcctgactcggcagcatgctccaactgcagggcctcggcacggctcctccttggtgcagagctgtcccttggctcttcgtaggtccctcctcatcattttcaactcaaatgtcccctcctcagagaggtcttccctgcctggcctagctggagagtccccactctgggtacccctcagacacgcagccctgtctcacaggcttcacagcaaccagcggcactgagatgctcacctaggctgtgtccccctcctcgagggcaggaacctggtctctctagttcacggttcctaggaggggacctggcatatctgaggaggccaggagaaggtgctgcttgattgagctctctcgcgagagtggggcaggggcggagaggccagcacccgccacaggatgcacaggagcagcagctgatggagttggctaagtcctgctctccacccctcccacccagacaccccagggagggacatggtgacctgcagccctcagaaagccagcatggcagtgctaggcactcttcgtgaacctggaccctagctctcctgcccgggaggaacacgccaccaacaacctagatgcatcagcgcctggggccaatcttggcttcaatcgccacactgggcggccccagcacctgtatatgtgcaggggttcccacagcccaggccctggactcaacaatggtgctcacattcattggtagcaggtgaggatctgatcatggatgaggatggggaaggctccccacctacagtgagctcctcggggtagccctggcctctttccagaaggggcaactctctctgcttcaccatcagcacggaggactagaggttgacggtcagtacctaggacagcgccaagcatcaagctggccacgccccaccaaggcaagcaggaccctcactagagcaccagtcctccccagctcctcctggtccatttcccaccacctctcactccagttacagcaccagcctcctaacgggcttctctgcctccaccttcacwccctgctgtcagcatcccggaaagatgtgaaaatagaaactgaggagccacatgtgtctgtaggaagggcaggctggaggctctgacctccacctttgtgtcaatttctgcgttaaactgaggcagcctgaggaactcaccagactcacagaccacagagccgggccgaagctccaacatcatggtgatgagggcgatgtctgtggagtagaggatctgcgtgcggtgcggcaggttcagcgtccagagctcgggcgtggggtgcagcacatacacccagccacctcggccgcacgtcaccttggagccgaaggggcggccgataaggtcaactgagtgccgcaggacaccatgccgggtctgggtctgtgccccacgctgcacacgcactgccaccattgcaccatggcccagtgacaggatggccgtgtcaccctccttgatcagctcctcgtatgccacgaagctcatggtgctaatgtctggcaagggccaaggacctggggaggggtgtgtgtaggcatgagcaagtcaggaggcaggatgagggcctagggtctaggtagaaggcttcgaggcctacatcccagcagtgggcatgggcggggtgtggctagctcagcctcagtctctgccactgcctgacagggagcccaatagcgctgcactctggcctggcctctgaagcctttcttggtctaggacaagagacagggactatgagcctaaatcagagatgaaaagactgaggcttggcaatggcggagttcggtcccaaggattcccggagtgaggacccgaccctcccatcacccttctccaggagcttgactcccattcccaagatgtgagatgaggaagcgcctttgcgaggtgtccaccggcgggggagaggcaaatggtcaatgaggtcacctccaagccaggcttgattcctcaccccagtctcccccacgggggctaggtggcagggtatgacagaggattcagggctccccagtaaggggctggggacgcggagctggccgtccacgcaaacaccgcccagccgatgcagaggcaacaaggggccaggccgggccggcgggggccgcccatgcgaggctggagggacaggccctgcgcgccgtgcccggcccgggtcaccctcacccgcgccctgccaccctgtaccccgcggagtctcacctgcgacgctcctgctgccggggctccacacgtgcctccgcgacgcgcggcggcggcggccacaacacttccggctccgcgcccgctgatgacgtcgcgccccgcctccscctccccctccccccctccgcgcacgggatcctgggagcgccaggctgcccttcccgcccctcccagaggacgtttcctgggcgacttcttccctcatgtgagctgctctgtttacatttgctggtcgctggaagatcgaaagactggacaaaatccatatggcggccggccggcgcggtggctctcgcctgtgatcccgcgctttgggaggccgaggcgggaggttcttctgagctgaagagttcgagaccagcccgggaaacgtagtgagacccccaccatctctacaaataataacaaacaaacaaaaggtccccccgccccgccggccgcgggttgccgtcgcacccaggcacatttgaagggcggcaggagccaaggcctggctgtcactgctgtcccggacccctttgacggcccctgggggttcaccagagggctggcccgtggctcactgcccagtcctctatgaggacacttcgccatagacattttgttattgcagactgctctgggaacacccctgrctgggccctaaaatgaattccagaaaaggaatcgcaggtcaaggggcggttctaaaaggcttgggctagggtcagccagagctctgtgcagcagatgggggcctggaaaagtctgcagaagtggccttccgcccaggccctgcctcccccgacgggggcacgttgtcctgagtgcagagctgcttctaggagggagtaggggtcctgtgtcccctcctgcgaaccaaggcataatgagaactggatgacttgggcccacttttgggtctggtgagcagcctgggcaggagactggaggaggtgctgctggaggatgggcagaacagggaagcgggagtggcgttctgtctcagcaacaccattcccagctggctcctctgtggagtgtgtgtgcaggggagcgggggcaggggacacggattttcttcctccagctcttagctctcaggaccagagcttggagaggaacagagacccccctacccagcctagggtttagcctgcgcccgaacccaagccagttagcaatgaccctagggcaccctccccagtcactcagccactccagcctggtaagatgaggtggccaggctcctgcagagcgagctcccctctggagccctggcagcctgtagagcactctcaactctctcgcctctggggcaggccaggccaggctgtttgtggcccttgcattggcttctcagggtccatcatggaaacctaggggtccaacctcagcccctctgtgtccctgccctagctgcggctgagagcccccaggagtaagctggtgagaggccttccatggcctcccactctctgtgggctcctgtccctgtggggccaccacgctggccaccagctgcctctacttctgccttacagcctccctgccttctgctctcaacgttgaaacagccccctccacagctcccgaacctgtgttccagcggatgcttctctcccttgatgatgcacccgcctgagtcaccccctaatttctcccctgggggattctgactttccacttctcttgggtttctcttccccagcctctcagctgtggttggtgtggagtcagggccgggtgcctataagggcctaaggtaggacttggtgactcggcggtggtttcccttggttccgacttccctcttgcctctctgtctattactggctggtcaactcctccagtgccccttcctccaggcagcctcctcagccctgcccacctgctccatctgagcctgccccagtccccagcctgagtcctcaagcagaaccaatcccccctacctcagctgatgattccctgtgcagagtttgtattggggctcccctaacaagagctgatgctgtatatgcccagctgtgccatctcattgacttctccccaggatcctaggagggagggaacactttacagatggggaaactgaaactcagagakgttaaataacttgcctgaagtcacagccagtgaggtcaaagtgggattaggatttaaagccaataaacccccaaagctcagcactgaggaggctgaagagggaggactgcttgaggccaggagttggagttctgcctggacaacatagcaagaccctatctcttaattaagaattaaagccagtaaaccggcttcagagaaccaatggctgatttgaagaaaggtgggaacaggcaggaaggatgcccactggggaggctgctgtgcccaaatccctggcagggaccacgtgactgcagtccctcccctctaagcagcacagcctcctaccccactgtgctctgtgatccccagtcagcccctgtccctctcctgacctcagcccgcttyctcttcgggctctgcagaactcaggggcagggcactgggaggaagcaatgctgcctcyggctgcactctgcagaggagcagactacaaggatagagtccagtgccctgcctggagtctgccctgtgcctgacctgctgagccgggtcatgttctgtggataaaagacctgggcctcctttgaagccccctccaggcccagtggttcacgtgtaaccaggtgtgatttctgaggaacctggaccaaacactggcctggtaacgtcatgcagcctcctgcctggatgctgccaaagcagcccctgtgggccccagggagagcaggggctgtggacaggggaggtcagctggaggggaggctggcaccttccaagcccctctccttgtgcacctgctctgggggacactaaggctcccaatcagcccctgcctggggggtctcaccctgacatttaggtctgaaggccttgagggccacctccccactgttatctgctgctgctgtccccgtcacagctgcctggcccccgtacactgtcattttgccccaggcaggctcgcacagggccggcgctctgggagggtggaaggattgctgggcccatgactggacacctctgtcacccaacttctgatctatctgcacrttgagaccagcctggccaacacagcaagatccctgtctcaacagaataaaaacaaaaataaaatgatcttctgtctgcacactggggacaaaaacacccacctcagaaagctgagggttaccagcggcgccaggccggagccgccccagtgccaggctcactgcttgccataggcagccctgccctctggatctcatatctgcagttctgaccttgcctgtggagggaaagtgtaggggaaagaaagagatcagactgctactgtgtctatgtagaaagaagtggacataagaaactccattttgttctgtactaagaaaaattcttctgccttgagatgctgttaatctgtaaccctagccccaaccctgtgctcgcagaaacatgtgctgtgttgactcaaggtttaatgggtttagggctgtgcaggacgtgctgtgttaaaatgtgtttgcaggcagtgtgcttggtgaaagccatcgccattctccagtcttgagtacccagggacacgatgcactgcggaaggccgcagggacctctgcccaagaaagcctgggtgttgtccaaggtttcccccgactgagacagcctgagatatggcctcgtgacaagggaaaaacctgaccatcccccagcccaacacccgtaaagggtctgtgctgaggaggattagtgaaagaggaaggcctctttgcagttgagataggaggaaagcatctayctcctgctcctccctgggaatggaatgtctcggtgtaaaacccgattgtacattctatttactgagatacgagaaaactgccttatggctggaggtgagacatgctggcggcaataccgytctttactgcactgagatgtttgtgtaaagtcagacataaatctggcctacgtgcacatccaggcacagcacctttccttaaacttatttatgacacagagacctttgctcacatgttttcctgctgaccctctccccaccattaccctawagtcctgccacatccccctcactgaaatagtagaaatagtgatcaataaatactgaaggaactcagagaccagtgccggcgcgggtcctccatatgctggcaccagttccctgggcccactgttctttcgctatactttgtctctgtgtcttatttcttttctcagtctcatcccacctgacgagaaataaccacaggtgttggggggaggggctgcccccttcaggaaaggggaaagggggtcctttcccatgggggacctgggaagcaggttaggctctcagccaggagggtgagagaggggagggttggccttctgagaagctgcagttgctgaagacagaggaagtcctgagtgtggcccccaagtctctccctccccccaagtctgcctccaggggctgcagctatcccttccagaaacagaaacttaagcccttcaggttttgtggggtagcaggtgggcagctgcagaaatttctaaaactgggcgaagaggctgcacggggcacagagtgcaggaattccaggcttaagggacacctgctgtctggccagcccagaggggccgtttgcctttttacatgggttggttttattaagtctaaaaaatgctggcttggaacaggacgaagcatgccaaggagcaaagaggcatgtgtctcctctgcagtgaccrtggggatgagacaggagaaaaggcccccacaccgatgctcacataggcagaggygaacaggcttcccctgcctttgggccttggctctggtgccttctgctctgaggcacctattcggggtcccttatacctggaacgccactgctctgtgtccccctggccccagcagcaccgatctgatgtcatctggtttgttgggctgctggctcatggccagtcttcytccagcagcaggcgctgtgtacctcgctgcctgctgtatccccagcggctggcacctgttaggtgctcattgtgccactgctggagggatttgtatcaaatatacccacagataagagttccccccttctttgctttattcacagagcaacagatgagggtccctgatggatattaaccccacatcctccacttccccctcttaacagctgcataatattccacagcaagcagatgcctccctacccttggccactcccgcctgatggggcatcgggttgtatccagttatgtttgtttttccctccacagatctcttggtccattagtggagagaactgagacatcctttctaagggctgcattcctagaaggggagattgctgggtcacggagttcgaacattgttaacgttaatagattctgccaaattatcttgcaaaaagcatgcagcaatttaagttgcaggcagcgtgtggacgcctgtcttcccgcattccagctcaaagccagcaatggctggggtcgatctgggagtgttgggggtaggrgcaggtggagtcactgcttaatttgcatgattctggttattcgtgagatcagtttttttttttaatcgcacttatgcttattgtttattagcgtttcctcccatctttgcctgaagtctccggggactgccttkgggggtcgggtaaacttgtcccctgcgaagagggcccagggttggggtctggaaactccgaggctgcacttgccagcggcctcttaaggccacagcgtccccgtggtttctggctcgcagccccccgagacccaggacttgtccaaggtcagggcaccgcgggtgcccccgggctgggccgcagccagactgcgcttcccgcgcgccttcgctttgcaccaggatcgcccaggaaaygcctgcgggcaccttgaggaaggtcggcggctccgggccagctcgcactggccgggggtggggcgggggccgtwcctgctgcggaagccccgaaagctttcgcccggcccctcgccgccgccgcgggggctggctggactaggcgggcaggctcgaggatgcggatgaacccaagcgtcctcgagtgcccggaggctctccgcctcagtttcccgcccagaggcaagggcgtgcgaggggatccagatatccaaggacctgaggtttcggcctcgaggtcttgggcgggggactgggcaggctgcgcggggtcccagcgaggggacagctcgggtgggcggccagggtgttgggggctgcgggcggcggacaaagcggcggcaccaccccgcggcgcgggccaatggaatgaatgggctataaatagccgccaatgggcggcccgcgttgtgccccttaagagccgcgggagcgcggagcggccgctgttcgcctgcgtcgctccgggagctgccgacggacggagcgcccccgcccccgcccggccgcccggtgagtgggcccgggggccgggggcgtccgcgcccgggctaggggcgctgcgtgcaaagggggcgcgtcgcctggagcgcgcgccggaccggccgggggtccccggcgatgatggcgctccccgcgcgcgctgcggaccccgctgaccttggccgcgtcccggggggcgccggggggcccggcggcgggggcctgagtggtacgcgggagcccgggaaccccggcgtgccggtcccctctgaccccgcgtctccccgcagcccgccgccgccatgcccttctccaacagccacaacgcactgaagctgcgcttcccggccgaggacgagttccccgacctgagcgcccacaacaaccacatggccaaggtgctgacccccgagctgtacgcggasstgcgcgccaagagcacgccgagcggcttcacgctggacgacgtcatccagacaggcgtggacaacccgggtacgcgmmccctcggggccggggtyccggccccccctccccccgcgcagccgcagggtcctcagcagcgcgctcgggcccggcagtgacgtcactgtccccgtcccgcgccccctcccccaggccacccgtacatcatgaccgtgggctgcgtggcgggcgacgaggagtcctacgaagtgttcaaggatctcttcgaccccatcatcgaggaccggcacggcggctacaagcccagcgatgagcacaagaccgacctcaaccccgacaacctgcaggtgcggggctgcgggcgggccgggcgggcggggccggggtcttcgggcgctcactcccgtctcgcctcccagggcggcgacgacctggaccccaactacgtgctgagctcgcgggtgcgcacgggccgcagcatccgtggcttctgcctccccccgcactgcagccgcggggagcgccgmgccatcgagaagctcgcggtggaaggtaggggccgggcgggccgaggggcggcggcggccgcgtccccctcccggcgcggtccccgcccgcttttgtttacgtcgcccgggagcggcagccgccgtcgcgctcttatctgcgcgcgcccgggttcagtttcccggagggaccgagggacggaggcccagccccgcgcccacagcggcctggggcccagggagggcgggtcctggcgcggggtcaccgcctgggaccgtcgcccgggccgtgaggactggacgcccgcagatccgggcgggtggggccctctgacgtcccccgaggtggggcacgggggcgggcgggtccgcgctgcgggctggaggggcgggcgcgggagccgagcgtcctgagcgcacccctcgcagccctgtccagcctggacggcgacctggcgggccgatactacgcgctcaagagcatgacggaggcggagcagcagcagctcatcgacgaccacttcctcttcgacaagcccgtgtcgcccctgctgctggcctcgggcatggcccgcgactggcccgacgcccgcggtatctggtgcgtgtccctctgcgccctctcgcggcgtcctccctccccgctacctccgctttccctctcgcccccctcgcgggggtggggcccctcgcggcgaggaggaggaggaggaggagggaggggccggccgcgctccgggtctgggttccgtgccgcgcctcctcctgcgccggtgaccttggccgagcaggtgcgttaagggactgggccccggcccgtgggggctcaggactcagcaacacctccccaccccgagacgtgaggtgggggcggggctctctggcgcctctcccckacggccctgggagctggagctctttgttttcttttctcactcctccgccgctgggattctaccaggggctggtgacgccaaagcttctccaggggcagggctcctacccccactgtggggggcgggtcgggctgtcctggcggtccctggccccgccccacctcrggccacagcgcatgatggcagctggggttctcctgctgtgaggcgtcccggttcccccgccygccccgtgttggcgggtggagtcttggcagcagcctccactcctgggcatggcagggagcagcacctcagggacttgggaagttcctttggtctgggggcggcctggggcttttttctgggtatgccctgagaccagccctcccgcaggcacaatgacaataagaccttcctggtgtgggtcaacgaggaggaccacctgcgggtcatctccatgcagaaggggggcaacatgaaggaggtgttcacccgcttctgcaccggcctcacccaggtgccagggacggggcaggcccagaccccagggccccagcagggatgtgggtgccccagcatcagtccccccgggggatttccggcactggggagtctcagggcctgtaggggtttcaggcaggccttctccctcataccctcttctccgtctgcagattgaaactctcttcaagtctraggactatgagttcatgtggaaccctcacctgggctacatcctcacctgcccatccaacctgggcaccgggctgcgggcaggtgtgcatatcaagctgcccaacctgggcaagcatgagaagttctcggaggtgcttaagcggctgcgacttcagaagcgaggcacaggtgagcagggcaggtgctgcggcttcccgtggcctttgggcagccctgtttcctccgccctgacttgctgtctccccaggcggtgtggacacggctgcggtgggcggggtcttmgacgtctccaacgctgaccgcctgggcttctcagaggtggagctggtgcagatggtggtggacggagtgaagctgytcatcgagatggarcagcggctggagcagggccaggccatcgacgacctcatgcctgcycagaaatgaagcccggcccacacccgacaccagccctgctgcttcctaacttattgcctgggcagtgcccaccatgcacccctgatgttcgccgtctggcgagcccttagccttgctgtagagrcttccgtcacccttggtagagtttatttttttgatggctaagatactgctgatgctgaaataaactagggttttggcctgcctgcgtctgagtggtgcctctcctttcccaggggggagggggaagggcagcagccaggccccaggagtcttgagtcctgggcctgctgtgggcctcgccttctgtgagatgggacaagagccaggaggtggccactctgttctgcctgccctacctagtccatgggccccttccctcgtgtctatcgggctgtgcaggcaggaacatgggagagagcgagggaggagctccaggcctgagcatctgagggcattcaggcctgggtgtggagcctggcacgttcctcaggcccatcctgcagggtgggggaggtagggatagtggaggtggggggttgacctcagaaacttgagagctttccggtccctccaactggcttcctcctccagtcttccaagctgcaacactatcagatgcaggcatctccctgcctccttcctaccccgccaacacctactctctatcttctcttccctgcttccttccctcccagcctcggccttcaggctgaacagcccccctggctccactggtcattgggctcagtcctcaagaccctctagcagccctggggagccactggtcccccctttactggcaggctcctcttcaggggcctctgggtgtccagccccttggcctcaaggtggaaccacaaggtagggaccctgggcagaaggggggttggggctgtttagggcttggtcgccctggtccctggtgcaacccccccgccaactcaccctagttgccagttgccactgtccctgcccagcctctggctcagggctcctaccatgattgggcaccctgaggggctcggccagctcagggagtggaggcggataggtgagccagcgggggctaggaatcctgctccccaccttcctccagctcctaagcgccaaggacgcagcctgtgctgccacctgctggccagggcctcctctgccccacccctggggatcagggtctgggacaggcctcatcctgcatctccatgcccacctggacactaaaagctgcggatcactgggctctcacctccttgggacacgaggggattgccaacctagacactggggcccaggagcagcagtggggtgcatccctgaatctgctgctgggcttggcttgtggggggtcctaagggcagggttgaagtgtccacctccctgagtgaacacctggtaggctaggggcatagggggcaggtcccctggtgcagaaggctggggggacttctgcatccagcctttggaccctagactgggccctccctggctgaccagcctgggcacaaggccagtttctggcttagccttttgctaggaaggcccgggccaggataggccgagctgtacaatcgagagtcttgggagaagggcggggacgaagggcccgaggtgagcacaggaagtgagcccctccagaaaggggaggctgagggcagtgaggaaggggcgcagacccagtggggacctgaccagcaaagccccacccccagggggccttgtcagtgctgccctcctcccgctcaacagcggcagcccctcctgctggctcagtccctctcatcacggcttgggcagagccagcctgacaatcgctggggtggtgtgggccccactccgaggtgaacacagggctgagggcatggctgggcaggcctaacacttgtgtttcaacgctccccttttcccatgttgactctcagagtggggcactcctagaaccaccggtggtcaaacaagcggaacccctaatcaccccatgcaggcctctcaacgcactgtccggggaggccgagaaggctgggcctggctcaggaccacttctgaggcagtaaaactctgaaggtgggtggggccttggctggcctgtggcgcccacagggcctggacccccagctctccgggccccactctcctccctgtgcctcacgtattttatcttactgcattaattcttttggggaccaggcagggcctaaaatacactcccctcagtgggggagctacagtcctgtctgcctgtgccactagttccacggagcctccaaccacagtctagacagccttcctttttcctcagactccgcagactttaacaggcaattctccttgaaagcactgtcaaacatggacagcaaaggacagtatctaggggcggcagggacgcagggagatgttctggctgttggacacatctccctgcagggcaatctggctgcaccaagccccacctcagctgtccctcctgtccactcagggacttcccagctagggaaggagtccacggcggggtttccgcagtggcgctccagacacttgggccggaccactctggtgggggccgtcctgtgcgctgcaggacgtccagcagcagccctggcctccaactgctgcatgccagtagtcctcgcttccccaacttatgacaatcaaaaatgtctagacattcacaaatgccccttagggggcaaaacagccccccttcctcgagtcccgttgccctacagaaatataagtgaacaatgactgagaacagggaaactgtaagggcttgctgacactgaagagtggctacagccccacccctcctctggggtcctgtgcagacagggaggacagtgtgaggaatctagtgaggtggtgacatgctgagaaaagctcaagagcagaagcaggttataaaacagcttgtgctctgagatcccacacagaatatgtatggaaaaaccccaaagaacagtagtcactgtgggtggtggggtaacaggtgatttccttctttatattttccaaattttctacagggcacatgtattacttatataagccaaaataatgtttttaatggtgttttgtagaaaatgctgtcatgtgttccagtctgcggaagcccaccaagcagcagcaagactttaccactaccacggcctgaggcctcacagacagggaaactcaggttcagagaggaagacagaccggtccggcctcgccggctctaactcctgggctcttttcactgctcttctgagaacattctagcctcccacagttgggacctgcttgtcttagcagtggcttaaaaggctgcacttgccccttctgcatttctatttcgagccagcgggcacttcctaaagcctcccagagcacccttcaggggttgcacattggacccacatggatgtgaagtgagtctccttttctacaggtaaaaagaaaacagtaatttgattggcaagaagtcttttggccgtgaggtttccactgagcagatgacagcatttcagcttagataagtgaggcttttttggtactgctgagaaggctgaggctttttttctttttttagacggagttttggtctcattgcccaggctggagtgcaatggcacgatcttggctcacagaaacctccgcatcctgggttcaagaaaagtctcctgcctcagcctccagagtagctgggattacaggcatgtgccaccacacctggctaattttgtatttttagtagagatggggtttctccatgttggtcaggatggtctcaaactcctgacctcaggtgatccgcccacctcagcctccccaaagtgctgggattacagacgtaagccaccgtgcccggccaggctgaggttttttacacgcagacttctcagtctggctagaggctttctgcactcgcagtgactgaacttttttgaggcgggrtttcactctgtcacccaggctggagggcagttgcacgatcgcggctcattgaagccttgacctgcctgggctcaggtgatcctcccacctcagcctcccaagtagctgtgtgactgcagggacgtgccaccacacctgtctaattttttctattttttttttctttgtagagacggggttttgccatgttgcccaggctggtctcgaactcctgggctcaagcctttcccctgcctcagccttccacagtgctgggattacaggtgtgagccactgtgcccagctggttggactctttccaccttttcccccaaacccaactttgtattgttttgcttgggttcagaagtcctgattttcacacccttttcaggcctggggatttaccaaaatttaaggcttaacaaaaattaaggccccccaaaagataaaagtgctactgccagyggcacctgtctctgattcaccttcatggcacggatgctggtggtcycctagcagccattctcccctctgcttgagtgacagcgccctggtttccagcctgcacgcagctgcctggctgtgaaagcacactttcaagactcccatgcagctaggggtggccaggtatcaacgtgctccagcagctgcccaggctgtgaggacaaggccgtcctcggtgctgtggggcgaaacgcctgcgtgtgtgcagcctggcaccaactcctgaggtgctggcaacattcctgctgtggtgaaggggctgcaaccctgttctaccattcatgaatcccatgcagcgtggggttcggcttgggatcctgctgggcttgcagaggaattggcccagtggctccaggtactccacacccacttgcactcaggacggcaccaacccctccagacgtgtttgttgcctgtttgcctaacctggggcagggctcccacctgcatgtctgctctctgcttcccacaatcgcccgaatcccctctgggaggactgccctgcctgcccaggcctccttcccggagggcctccttctgcatccctcttcccctccggctctgtcctctgtctcttccccattagaggactgctgggctggtgagccttctctcttgagaatgcggcctgctcccagggcagggcttaggtcttgcttcattactctcattccacctatactcagctgcacccattactggtatatgtggtctgtgttaacacacatcaaagctattccggaaatatacaacttatagcaaaaagacagaaactcccattaaaattaaaatgaaaagtctagttttgtcaatacttttgacccatcgactacccaacatattaaatggcacttcaaatgtgttacactctcaaaaagaaaagaaatatagcaatcaactcaaccaaaaaaaaaaaaaaaaaaaaaagaaataataaaggtggtgctactcatctatacccaaaattgttcctttaaaatgtattattttttattttttttttgagatagggtcttgaagtcacccaggctggagtgcagtggcaggatcacaggtcactgcagcctcaatctcccgggctcaagtgatcctccctcctcagcctccccagtagctgggaccacaggagcgcatctccacgtctggctaattctaaaatttttttttgtagagacggggtgtctcgccatgttgcccgcccaggctggtcttgaactcctggcctgagcgatcctcttgcctcggcctcccaaagtgctgggattacaggtgtgagccactctgcctggccccaaaactgctgtgcttctgagggacccctgtgctgcagcccccacccaagtcacagcagcagcacctacctgggggacaaaacgctgtggcagaggggccagagtctggcctgaccctattcactcttccttgggatcagaaaggagcatggggattgctttcctctgttctcctggccttgacacaggataacatgactaactttgtcagcaaagttccagtgttttggttaaattaatgaaatatacaggtggagtatcccaaatccaaacatctgaaatctaaaatactccaaaacctgaacctgagtgcggatgtaatgctaaaagggagtgctcactcatgcatttcagagttcagatgttcaaatttgggatgcttaaccagtaggtataatgcaaatattccaaaatctgaaaaaaccccaaacccgaaacacctgtgggtggtcccaagcatttcagataaagtattcccaaaccaggaaatgcaagc

SEQ ID NO: 95278 - DNA, 77980 bp, Homo sapiens
tgttgaaggagtgtgaacaactgtgtgctcacatataattcctggaagaaatctctgttttcagaagaaacaagtaaaactatctctccatcctatcgctttactttgagtttttatgaaaatctatggtaaggagaaattgtgtctgaatacttctgcaactagactattaaaaggtcctgagccaggtgcagtggctcacacctataattctagcactttgggagccaaggtgggaggattgcttgaacccaggagtttcagaccagcctgagcaacatagaccctgtctctataaagtattaataatttttaaaattagctggatgtggtggtgcatgcctgtagtttcagctgctccggaggaggctgaggcagaaggatcgctcgagcacaggaggtagagactgcagtgagccatgatcacgccactgcatgccagcctgggtgacagagtgagaccctgtctcaaaaaaaaaaaaaaaaatggcctggaggatatcatgttaagtgaaataaagcaggcacaggaggataaattcttcatgttcttactcatgtggaagctaaaaaaattgatctcataaaggtcaagagtagagcagtggttactagagctaggaagggaagtggggagggggactagagaggctggttaatgaatacacaattgtagttggatagggggaataaattctggtgttctatagcactataggcagataatagttaacaatttattgtatattttcaaatagctagaagagaaggttttgaatgtttccaatgcaaagaaaggacaaatgtttgcggtgatttttttggctaattactctgatttgatcattatacattgtatgtatatatggaaatatcacaccacagcccatacattccatgggctatattattaggtgcccactaaaagcaactttaggttgaggcggaaagatttcttgggcccaggagttcgaggctgcagtaagctgtgattctgccactaaactctagcctgggcaacagagcaagaccctgtctcaaaagagatataattttaatttaaaaaaaaaaaaaaacagctaaggctgggctccatggctcatgcctgtaatcccagcactttgggaggccgaggcaggcagatcacttgaggtcaggagtttgagaccagcctggtcaacatggtaaaaccctgtctctaccaaaaaatacaaaaattagccaggtgtggtggcacatgcctgtagtcccacatactcaggagggtaaggtgggagaactgcttgaacctgggaccagagattgcagtgagctgagatcgcgccactgcactccagcctgggtaacagagtgagaccccatctcaaataataaaaataaaattaaatttaaaaacagctttagaaagatattgggctggcaaacagggaaaaaaggggtgtcatagattcattcattcgttctatagctcttatgaagtgtcctctttgttacaggcactgtttgggtgatggagatacagagagaagcacatgacgtatgattcttcaggagctgctgggctagtgctgggatgatggcaaacatataaaccctcggcaggggaggcaacatgggagctgtgtccttggtgatggcaggtagtaaggaaagggcattcaagggcctggtgcctccagagacgaggaagggagcccggggcatatggagggcctggagaggctcaggtcagagctaagaccagaggtacagtgaggctatggtgtggaagggacttgaacaccaacctagggggatttgacttgatgcagaaggcaactgggagccacattgtttctaagtcaggggatgaacatgctccgattgctatggaagaattttccaagcagcgctattgaaaagagtgatggagcctggatgcagggagacatggcatctggaggctgctgcagcccttggtgtgtatacagctggcgctcacctcttccccttctttgtttcctcctccctttcctgattttcctctatctctttcctcttctttacctactgccctcactttcttcatcagttactttctcctccatcctttcttcctgaaagggccagaagctctaattgtggacaggctagaacagatccttttgcctcctttagtatttctacttcgagtaaaaatgtctgatgagacagtgtacttctgtaatatatcatccttatcaataaaataactaatgaagtttggcaataaactatccagtgatatactcgtggggaaaacctgaacacatttaaggagtttggcaagcagtgcagtttcaaggtgaccctatttatagaatggaggcaccttccacctcctaaatgaacacatacttccatctgctgtggcattgttcggcttcctctagaattttccttggcatcacccgcaagccccaacttgtcctacagggacaagacacagactcaccaactgtgaagttctgaaatgcagctgatctgcaatactcactgtggcaccaacctgctggtttgaacaagtatgaaaaccttttagcagaataccaagcaataggaggtgcaaattaccctcacagtgaccacgagaaaagcttctccaacgcacagttgcaaatggtgcagggtagttaccgggttcctcaaaaattaaaaagaaacggagtcacttaaaaaataaaataaaatccagccagactctaaagcaaaccagctagcaagaatagctagtgtattgcaaaagtaatgggctttgcttttgtgaacccagaatggaaagtgcaaactaatggtttggcataagtctttttcagacatacccagatatacagatagtgatcgtgatagtaaaaaaaggagtgtctttaagattttttttctttttttcttttttttttttttttttgagacagagtcttgctctgtcacccaggctggggtgcagtggcgccatctcggctcactgcaagctccacctcctgagttcacgccattctgcctcagcctcctgagtagctgggactacaggcacccgccaccacacccggctaattttttgtgtttttagtagagacagggtttcaccgtgttagccaggatggtctcaatctcctgacctccttatgcgcccgcctcggcctcccaaagtgctgggattacaggcgtgagccaccgcgcccggcctaaggatttcttttggtctttgtttttctgtaagttggttagttattactgcataataaagcactccaggccgggcgcagtggctcacgcctgtaatcccagcactttgggaggctgaggcgggcgaatcacttgaggtcaggagtttaagaccagcctggccaatatggcaaaaccccgtctctactaaaaatacaaaaattagcccagcatggtggcgggcgcctgtaatcccagctacttggggggctgagacaggagaatcgcttgaacccaggaggcggaggttgcagtgagctgagattgtgccattgcactccagcctgggcaacaagagtgaagctccgtctcaaaaaaaaaaaaatggttaggatagtacgttttatgttgtatgtatttttccaaaattaaaaaagaagttaaaacaatttaaatgaaacaagaccaattgtacaactataatcttacatctgtagtaggagtgggccaggcagaatagaaaattcccaaaggccttttaaaatacactggcaagatactacttagcccagggcctggtggctaggctggttctctcctttccaattggaggcctctgccgcagacacgctccaccagatcatcggtcaggccaagaagcatccaaacttgatctccctcttagtatttattggagctagaggtactggagcaggactgtatctcttgcgtctggcatttttcaatccagatgttagttgggactgaaagaatcacccagatccctggaacaaactgggtcccgatgatcaattcaagttctactcaattaatgtggatcacagcaaactgaagaaagaaggtccagatttctaaatgaaatgtttcactataaagctgctttagactgaaggtcttccagaatccgtccgcacaattttccacttcaccaggaaatagttctcctctaaatgaatgaaatcatgttgatgtaatctattggagattacactgattaataaataactgaaacttgaaaaaataatacactggcagccatttcacagtgctcccatccaccaaataaactttagatctaagatgctggaagttgccacttggttccaattctccaaattctgaaattaagccagggaaataagtaaaaatatttagaaacatagtgtttctatacgggacagtaggatttaggaagccccagggtcatctgtaaacttttccttccttccaaagattaatgctgtaaaacatttgtattatataatacttcaatccagtactgtaccgatgtacttcaatccagtactgtaccaacttgtttccattctggggaacagatgttccctgtttgtcattgttttctagtgtttcactggtttttgatgccctcattttatttttccaggattatttgttttcttattcttttttagagcagttcttagtcaaaacttcttgaaaattcagataaatatatgactgctgagtttcctttgccttaagttttaaaaactcttttagagaacccttctggcaggttagagtggatgatttgattgataggcttgctcctggccagtttcctgttggttacccgagcgggctgcgggttctccaacaatccatgttcacagagatgagctgcaggaacctcactcatctgtatttgcttytatcctaaagtttcacagaggtgacatgtgacattttgcctcagaaatagttgccgttgttaaaggcaatattgtatttccttttgtgttttgaccccatttgcccttcttacagaattttagttgtctcaatgccaaacagctgacgggctttgaaatcgctctgcagttttcatcttttgatacttctagctcattgcgttttaaaaacatagtctcccttggggaaaaaagccataaaatgctcctagtatcttctgcaaaaaaaggacccacaccaaaaaattcaggtggctctttaaagtctcattttcctcactgagcgggttctgatgattatctttgcaaaaccactgcggagacttccggtggcctagcagcacatttgaacaagatcatctcagcaaagcaaaggacaggactgctctgtacagaatgcagtagcaaataagagaggctgaacttcaccggtcttctatttggcagtactacagaatgcctcccttccctcttctgagagagacagcggacaatttcagcacagaaggccgtgcacgtttgcttggaaatctaggtcatgaccttgactttgggaaagccagggtagcctacctgaaactgtccaatcccccagcatcgtggacacgtccccaagtccctcaagatgtctgttctggtctgagccgtccgtagtagtgtccagggaaagcaggggtagctcaaaaatttctgtcaagagttttagtgctgcaagcctggttgggacagggcggtggagggctggaaatactgtttttgactttgaatttgattttataatgtattagatggatagatagatgcgaaatggaattgttaacatgtatgtggaggggcgggaagagtttctggaaagccccatccctgagtgcctactcctgagtgggaaaaacccctgcacgggctgggagcgctccctaattcgtccagaagtaaaatcgcatggcctgtgttccaaaaatgccgccactcaggatgtcaagtctgcacgtttgcagctttgagagccgagccccaggcagaggcaccgcgcaggcctggatgtacaggactcggccctgtgcagggctggccagggtgagcagggttggagctggcggggcggggaggggcggggccatctgggaggggctgcggcggtgggcggggttagagggcgggtttgaagccggcagggtggggaaaggcggggctggaggggaggggtctcagaggcgggcggggttagagagctggattgaagccggcgggacggggagaggcggggcttggtggggagggacgaagaggtgggcggggttcaagcccgtggggcagggcggggccggcgggcagggcggggccggcgggctgggcgcggacggtgaggggcggggatggagggcggggcgggacggagggcggggagggggcgggacggagggcgggacggggcgcgggcggggcggggcggggcgtagcgcccgggctccgactccaagcagtacggcgggaggcactagagggagctgcggccgctccggcccggccccgagcaccgcctccccagccagcgccgccgcgatggcggaggacagcgagtctgcggccagccagcagagcctggaactggacgaccaggacacgtgcgggatagacggggacaatgaggaggagacggagcacgccaaagggtaggggcggcgcgctggcgcaccgggcgcgacagggcggggaccgcgcgcgccacggtctcccgttcgggggtggctcccaggactgggggttcttcggccgctccgccccgcgatggcttctccgtggcgcggagcccatggtgaggtccggggcgcgcggctcgcgggagagtgcagtgcgcggggaggcgaggcccggggtgggcggggaggctggggcccgggcggggagacgctactgtcacttgccgcgcgcccccggccagcctcgcccatccccgccggcggcctggcccaggaggcgcctgttgccctcgcccgcgggtggctccggtgggcgccgaggagaggcgctacgcccttccctttgtggcggccgcagcctggggtaggaggtcgccctcctctgctccctgccatccttgttaagtcccttcagactccctctccgcagccgccacccgaaaagaatgggcaaagacgtgggtggagcggcgtggaggtgccccgatggtgtcggggccgcaggcggcgaactgcgcaaagttctggcgccgagggggtcccgggcccggcccctgctggggatactgggctttgcaccgcctcgcctgtccctagagctcttcagagcagggccgatcccctgaaccgggctcccgctgacctggccgtatcctgtttgcaaagctggtatttgatctccaaaactcgatgcaccacgcattttcacacttgatcggatttcttaatcctttccctttgcccccgaaccctgcagacttgatttgctcttctgttggagaaaaggattgcttcaggtgaaggccggtgttgatgctctctttttagaggcagtgggtcattttaaataaaaactggtgtccttttaaagtgctgtttacattacccttttaccctattggattcaaactatgcgctggcacagagcggttcttgctacacccttagaagtgagatttttcgaaccatggtgagtgatggagaagtgggtcagcttaaaaaacatgatagggaggcctgagtcacagatggtttactcagttcgtagagagattcttgaaatgattgatcattgaaagtgtaaatcatttgcattctacttgtctactttaagatttattatagaaagggacttttgactgacctctaattcattataaaatattaacaaatgaagaaaaagaaaagctgactatgtgcatctcccatttgcaagttgtttttatctttgccgtgaatacttcagtggcggctgcaagtatcgaatgttcgagtctagaatatttttttttttaaagagaggaaaggaaattgcataggaatctgaacctgagccctgtttatgcagggatagaaacgtgtttgtgatagatagctaaatacaaatatgtttttgaaacggtagttctattgccagaaatgggcccaggtgcagatgcaagctgatggattagcttcagtacctgtgttttctttctggagagaccctggacttttatcttctctgctgtaatttctgtttattgttcctcctttgattgatattctaggttgggggcttgattaggacttctttgcttacactgttgagaatgcccctggtacaaagaattcctcatctgtgtgcgcattgatctgagcctgtcccccgacacctttcaagaagctaaagttcccagagtagcacccagaggcatctgtgctgccttcggaagttttcagttttgtatatcagcacattttatatattagaaaggttaatcaaaatttagagatgccccatggactgaaatgttttcaccaagagcagataccatgttaatagcttctagtgggaaaagattaacataatggatgtattgtactctatttaaatgtaaggagattaggaaaactccaaatgactgctctccttggattgcctgtttggatttgaatttagacaatgtgtgccaaatttgggggagtaaatgtgttttatttggctcatgtactgatgatatcgcagtagaaacctaggttttctttaagtagctcaagtttgtaaatgttaaaatttgaaagactctttttctatactcggcctcttcattcccatcagtttaaataaataacaaataatgagcctttggatgaatcagtaagaacatgtttcacctcttaaaggcagtttgtcaatttgaggccaccaggcagcggccagtgcagagaggtaatttactgaatagtgcccttgtggcctgaaagaattcatttaccccaccactcagtataatgtatttactagtccttttagacatattaagttgaaactaaagcctcaaataaaaggaaaatacccaattagagtcttgttttgcaccaaaatgtaagtatttaaatatgtaaaactgcatatgctgttcttttattttcatggaattttcttcatggactaaaaagggtatttcgttttatagataaygctaagagtccatgaatgaaatatcagatgttttatgtttaattaaaagcaatggcgtaagtattataaaatacttgagtctcactgtctttatatcttgtttttcatggaaaatgtaccttttttttttttttttgagacagtctttctctgtcacccaggctggagtgcggtggtgcaatctcggctcactgcaacctccgcctcctggattcaagcaattctcctgtctcagcctcctaagtagctgggattacaggcgcgtggcaccacacccagctaatttttgtatttttagtagagatggggtttcaccatgtttgccaggctggtctcgaacttctgaccttaggtgatatgcttgcctcggcctcccaaagtgctgggattacaggtgtaagccagtgtaaagagttaaatgtactctttaactttttggtccacccaagcgtggaagtggcaaaccactataaaactttcatgaattacaaaaaacatgggggaagaagggattgtcagttttaattagtgagactatattcagacaagtataattttattattttcaaacaatgtttggcaattagaaccaggctaatagaggattgcctaaagacatctttatataacttactttaacacacgatttgcaattagaattagggagtaggtctttataaagagcttgaaggagcctggaaagactttctacatagataaaaattaacctcagtccagcttcctatatgaattattagaaatagtccagattactgaagatttctgttctgctatgggtggcagtggtacaaaaaggtgacctggaggatgattttttttttttttttgagatggagttttgctcttgtcacccaggctggagtgcaatagtacgatcttggcgcactgcaacctccacctcccgggttcaagcaattctcctgcctcagcctcccaagtagctgggattacaggcgtgcatcaccacgcccagctaattttgtatttttaatagagacrggattttaccgtgttggttaggctggtctcaaactcctgacctgaggtgatccccacctctgcatcccaaagtgctgggattacaggcgtgtgccaccatacctggctaattttgtatttttagtatatttttagtagagatggggttttaccatgttggtcaggctggtcttgaactcctgacctcaggtgatcccctggcctcggcctcccaaagtgctgggattacaggccatggtgcccggcctggaggatgaatttcctaggagctttcactgttggatctgaggttaagatgctcaaggatctttaatacttccctcattttgctgtgtttttgccttctgttactttcttctgaagggctttggggacattgaggacaggccaaattgttgaagaattatttagaacccactgtcttctcgctgtccttttgatgtccggcttctccagttatgaaatacatttggtattggtcatgwtytcttactgagctaatgttatggtccattgttggagacagagtcaaataaaattcgtgttgaactttggtaacaaaaccaaatctgtccccttgcttaaccaacattgacttacagagagcatatacttcctagaaaaatagatgtttctcatagctttccgttaagagagcttttccctcaatattcactggaagcagctactaagaagatttatataggaaccaaaataaacataggtgagtatgtttttgttggcagatacatgactaaattagtccctggggtagacatgaaatagggttaagacctttttttttttttttttttttttgagaccaattctcgctctgtcccccaggctgaagtgcagtggcgcgatctcggctcactgcaagctctgcctcccaggttcacgccattctcttgcctcagcttccggagtagctgggactacagtaggcgccygccaccacgcctggctaatttttttgtatttttagtagagacggggtttcaccatgttagccaggatggtctccatctcctgaccttgtgatccgcccgcctcggcctcccaaagtgctgggattacaggcgtgagccaccgtccccggcctaagacgtttttaagagttctttttcttagaaagattgaagatctggtattggacaaagatgaaaactttggaattcttttaacaaagaacataatctgtcttctaccatccccaatttagggggwaaaaaaaggaagttcttctttgggcactrtgttgttgtatctgacttyatmtgtctgttgttgaaattgagttgggaacttcccctttgtcagctgtgtggtatcagtgggaaaatgcagaaacattatgacttgcaataagtttttcttatggaaaatttagggataactcaaagctgccctttctgaaatttgatctgttatcaactgtataaatctaaatggaaaaatagattaacgacagtctttgcctgagggacctcctcaaatcaagaactactgtttgaaatgatcaagtrtctgctaagacttgcatctgaatgggtgatgtcaccctttggcccagaacaaattttttccagggttgtctaaatataggacacatactttgccatctttgtttgttagtgcaaatgtacgttatacatctatactagttaaaatcactttattttaacagaaccaagttctactccaagttcaagaaattgattgttgttttctttgaaaacatgttaatgacgttttaaaaatacgcttattcaaaaatcaaacaatagggccaggtgtggtggctcatgcctgtcatcccagtgctttgggaagccaaggtggaggatcgcttgaggccaagaattcaagatcaacctggggaacatagcaagaccctatctcgatgaaataaaaaatgagctagacatggtggtgcatgcgtatagttccagctacttgggaggctgagatgggagaattgcttcagcccagagagctgtgatcgcactactgtactccagcctgggcaacagaatgagactctgtctaaaaatatacatatatatatatctctctcttatatgtatatatttatatatatcacatatataaatatcaaaagatatcaaatatatagatatataaatatcaaatatatagagatatataaatatcaaatacagatatataatatcaaatacatagagatatataaatcaaatatatatataaataaaawatatatatatatcaaacaataaggtatataaggtagagtgaaagcccctggtcaccttatttcccagagctgtcaccactgatagtttaatgaactcactttttaatatgtgtgtgtgtttaacatcgctgggatcttactgtacctgggtgcatttgttaccatgtatgtttcgctgactcttattgttgtgtgctggaactttctggggtgatagtaatccagttgggcagtcatcaacacatggagcacttgcatgtgacaagtgtgactgagctgaatgtttttattttatttgaattaatttaaatttaaatagctccatgtgactagtggctatcatactggacagctcagatcatattcagtctttgaattttgtttataagctttcttggtactcaaaaatttctgtattttatttcctgtctttggtagaatatgtctagttttcattctttttttcttctgtggattatctgtacactttttttttttttttttttttgagacaaggtctcactctgtcatctgggctggagtgcagtggcacaatctcagctcactacagccttgacctcctggactcaagtgatcctcccacctcagcctctcaagtagctaggactacaggcacatgccaccacacctggctaatttttgtatttttgtagagacagggtctcactatgttgtctaggctggtctcgaactcctgaactcaagcagttcacccacctccgtctcccaaagtgttgggactacaggcgtgagccaccgtgcccggcgatctgtacattttgaacaagtaygttttcatctatatttctttatccatatcaaaaaattaaccactatttaaaatattctaccatctcacaagaaaaatcatgtaggatattttgacttcttttcatttcctaggtttaattgaaataacctggaattgtaattcttttatttttgcccttgtgtcactagagacttttttcttaactattacatgtttcacattcctgttaacaaaaacattttagactttcctgacagctttattgtttttatgggtttccatcgttctttataaaacacatcctcccggccaggcgtggtggctcgcacctgtaatcccagcactttgggaggccggggtgggcggatcacctgaggtcaggagttcgagaccagcctggacaacatggtgaaaccccatctctactaaaaatacaaaaaaacattagccaggtgtggtggcgggcgtatgtaatctcagctactcgggaggctgaggcaggcaggagaatcacttgaacccaggaggtggaggttgcagtgagtcgagattgcaccattgcactccagcctgggcgacagagcaagactctgtctcaaaaaaataaaagtaaaaaataaaacacatcctgtctttttcttctttaacagcattctcacatgattttttttcttagagtgcgtggatgatgtattttgagttcttgcatgtctgaaaatgccattcttttcccctcccacataatacatagcctgggtgtgcatgtgactctatgataacaatcgttttccttgaaactccataaacgttttaatatcttccagtatttactggtacagatgttgttttctttgtgtttttttttttttttttttttttttttttgatttttgaggcagagtctcgctctgtcacccaggccaggctggtctcgaactcctgaccttgacctcaggtgatccacctgactcggttccccaaagtgctgggactacaggtgtgagccactgtgcctggccagatgctgttttctctgcttctctgtcttttataggtaatcttattctttttgtctgttttaacttgttttcagtctagaagcttctggcattttttccctgttgttctattaccaaagggtttccatgtcctttcacatgctgggatcgcctgtcctttattttttattttttgcaatggagtcttactctgttgcccaggctggagtgcagtgtcgtcatctttgctcactgcaacgtccacctcccaggttcaagcgattctcctgcctcagcctcccaagtaggcaggattatagacgcacactaccatgcctagctaatttttgtatttttagtagagacggggtttcaccacgttggcyggctggtctcgaactcctgacctcaaggaatctccccacctcagcctcycaaagtgctgggattacaggtgtgagccactgcacctggcacctttcctttactatctaaacaaaatggcctgagctgatacatgttcatgggggtttcttggggtcttaagttttcatggtcctcaggcacacccacactgcagccaacttgccccatcaccgggctccttgtgcctgtgtgtccttagggtgctctttttcttcaacatttgaccttgggtggaacacggttatcttcagttctgtgtctctcaccaccctcctcccaggaatcactaaaatccagctattgtgcacagcatttgctgaagcgtttgtggctaatggggagggagggaggtctgattacagagtagcgcagaaaacaactttgaattcagtgtcagacatcattgttcaccaagaggaatttgttactgctcacgcctttctgtgggtcatggcttcctctgcttctgagagtgtctcctgatctttcttctcctcttctctaagttcaaggtcagcccaaatgtcctttctttcatgaagccttccgcagccactatgaccaaaggcgctgacccctgccggaagccctgtagctcttagtgagtgtatctttcccgtgacatctttcccagttgctctcacctcatctccccmgccctctgctcgggaagaccctcattctcctgccccaagctgtggctcctagaggtgagttccttgtccacaatcacaaatgggagatgtgggtctttgcgtctgttgcttaatgtgtgtgtagcatctaccaaccagctagagtaaaaggttttattttgctgggcgcagtggctcacgcctgtaatcccagcactttgggaggccgaggcgggtggatcacctgaggtcagtagttcgagagcagcctgggctacatggtgaaaccccatctctactgaaaatacaaaaatcagtctggcacgatggcgggcacctgtaatcccagctaatcgggaggctgaggcagaattgcttgaacccgagagatggagatcactttataagcacatactgcagtgagccgagattgtgccactgtactccagtgagcctgggcgacagtgagactctgtctcaataaataaataaataaataaataaataaatattttaaggaggttttatttaaatatacaataggttatctgaaaataaagtatggctggactttattagaattaaacattatagaaagtcaagtacccaaggtccatctgtctttctaacctctctccctttctgtctcagtctctgtcaactagactgccccaagcatctgttccttagttcagattctccagaaaggatctcactggtttctggccaagaaagggattatccaggcatgatccagtccactgtgatggagaagggaaagggaggggtagaagagaattgtgtggtacaacatggccactgagggccacacctttggtgagacctgtgggcaaagggagttttcagggaaggacatagtgaacaatgctggcaccttgctgggactgaattgtatctccctgccaattcatatgttgaagcctaaatccccaacgtgatggtgtctggaggtggcacctttggggggtaaatagcttacaagggtggagtccccatgaatcggatcagtgtatgcttataaagagatagagtccagtgctttgttgctctgccaagaataaggccctcaccaaaaacctgaccctgctggcaccctgatcttggtggacttccagcctccagaactgtaagaaataaatgtcttttctttaagtaatcagtctatcgtattctgtaatagcaggctgaactaagacacacctcaaaacatgtttgcagaacacagcgtgtctgcctgtctactcacaggtagattgtgtgcatggagacagcactttcagtctccaatccttgcaatacctggtaccttgcatgtgtttgtaacttactaaagatttgcagaatggattccaatagctcttaattcccattgacaaatttatttcaaattgtctttattttatatgcattaagaatatgtgaaggcttttctttttctacttctcattgagaggactttggctgtagagtttttagttttggtctgctatatagggcccaacatttttaaatggtaactaattttttgacctcttggcatatgcttatgtatttttcttttttttttttttgagacagagtatctctctgttacccaggctggagtgcagtggcgtgatcttggctcactgcaacctccacctcctgggttcaggagattctcctgcctcagcctcccaagtagctgggattacaggcgcctgccaccatgcccggctaatttttgtatttttagtagaaatggatttttgccatgttggccaggatggtcttgaactcctgacctcaagtgatccgccctcctttggcctcccaaagtgctgggtctacaagcgtgagccaccgtgcccagccttatatattttccctggttgactcattacaataacaaatgaagagattgtggcttatcagttttaataagttatccaggccataactcaaattcaaacttagcttttaagtctatctgactgtaaatctgttgcttttcactaaactacagtctcttggactctcaataagagtaatttgataatgtctcaaggtctttttctttataagtcatagattgattaccaacctgaacacctttggagccaaaattcaccagtgtaatgggtcaatgaattaatttttttaaaatcatacatttctttgcttaaagaatattgcaaatcaataattaggaactcttttgtctctagttccttaaaggactccttttattttatagcatcagtgtacttagtaacaagtttttttcttttttgcttctttcatggcttaatcatctcttttctgactgccttacctgtagccttgtacatatcagcacccctttctctggagcctctgccccctgcccccagcatcaccatcattcagagttccacgaagccaggttcctgtgagaagtgacatggcccacggaatctggtttttcatctcctgggtgaaagcgctgccgggaggtacccacttcagccctcttgtaccccattgctgcagcctatgcccagtctgccctggatggtggctctttgtggatgctttgagtaagttagtggcctgtcatgctttcccagccttaggagaaaacctggttggagtcgaggactgaatttggatgtcacctttacagtttctgttttgtttagtgcgcttctgttcctggcttaaactcacagtgccccggggaaatagggacttctttatttccgtagctgtgttctctcagtgttccagctcatatagtaccttcccagagaaggttggggattcagttaacataagaaattcccatagttttttcctttagtgtttctttttttgggagggcagggggatagttgttcttcactactttaggggtatttattaacattttaagaaaactgaagaaagaaccagtgaaagcagagtgcttattttggtttccaaatgaagtttttaaaaagttctttttgcgaaaccttttttttttttgttgagacagagtctagctctgtcgctcaggctggagtgcagtggcgcaatctcggctcactgcaacctccgcctcccgggttcacgcaattctcctgcctcagcctcctgagtagctgggattacaggcatgtgccaccacgtatggctaatttttgtatttttagtagaatggggtttcaccatgttggtcaggctggtctcaaactcctgaccttgtgatcctcccgcctcgacctcccaaagtgcttagattacaggcgtgagccaccgcgcctggcctgaaaccacatttttaatgtagaacattcgaatgaatcactaagcaaaaacgccatgccttggtatattcatatatacattttcctatttataaatatttacaaaaatgcaaatatggtagcctccgccccgtattagtccgttctcatgctgctataaggatgtacgttagaccgggtaatttttaaaggaagaggtttaattgactcacagttctgcatagttggagaagccttaggaaacttacactcatggcagaaggggaagcaaacacatccttcttcacagggtggcaggagagagaagaatgagagtgaggggggtgaaagccctttataaaatcgtcagatttcatgagaactcattccctgtcatgagtacagcatgagggtaaccgcccccatgattcagttacttccctccaggtccctcccataacacatggggattatgggaactacagttcaatatgagatttggatggggacacacccaaaccacatcaccgccttatctgtgattttgctttctgcagtttcagttacccttggtcaacgttggttcaaaaatattcaatggaaaattccagaaacaattcctaagttctaaatttcatgcccttccaagtagcatgatgaaatctggggccatcccaccctgtcccgccctggatgcgacttttctctttgccagcgtccccgcctgcaggtcacttagtagccatctctgtgatcaaattcactgtcttggaatcacagtgcttgtggtcaagtgacccttactttacttccatggccctaaagcacaagaggagtggcactggcaatttggatacaccatagagaagccataaagtgctttcttaagtgaaaaggtgaaagttctcaataagaaaagaagatcacatactgtggttgtaagaaggaatccttggggccaggtgcagtggctcatgtctataatcccaccactttgggaggccaaggtgggaggatcacttgagcccaggagttcgagatcagtctgggtaatatagcaagatcctgcctctacaaaaaaaaaaaaaaaaaaaaaaaaaaaactagcccggcatagtggcatacacctgtactcctagctactcaggaggctgaggcgggaggatcacttgagcccggaagttcaaggctgcagtgagctatgattgcatcactgcacttcagcctggatgacagagtgagacccaatctcttaaaaaaacacaacaaaaaaggctttgcagacgccaccgccaccaggagccctgtactaccagccatggtcaaccccaccatgttcttcaacatcgccatcaacagcgaggccttggggcacgtctccttcgaactgtttgcagacaagtttccaaagacagaaaactttcgtgctctgagcactggagagaaaggatttggttataagggttcctgctttcacagaattattctagggcttttgtgtcagggtggtgactttacatgccataatggcactggtggcaagtctgtctacagggagaaatttgatgatgagaacttcattctgaagcatacaggtcctggcatcttgtccatgaagcatacaggtcctggcatcttgtccatggcaaatgctggacccaacacaaacgattcccagattttcatctgcactgccaagaccgagtggttggatggcaagcatgtggtctctggcagggtgaaagaaggcatcaagattgtggaggccatgaagcgctatgggtccaagaatggcaagagcaggaagaagatcaccactgctgactgtggacaactctaataagtttgacttgtgttttatcttaaccaccagaccattccttttgtagctcagaagaacaccctccaccccatttgctcgcagtatcctagaatctttgtgctctcactgcatttccctttgggttccatgttttccttgcccccttccatgcctagctggattgcagagttaagtttatgactatgaaataaaaactaacaaaaaataataataatctacccataaaattgtgaaaaaggaaaaatacctttgtgcataggctatgaagtttaggagtgggtactagccatggttttaggcatctcctgggagacttggaacgccttcttgaggataaggggcacctactgtatactgtttgtattcatctgttgtcatttgaaaggaactgaatgtctttccaggtcaccacacagcctgcacctgartcaggtcaattggctggccatcccgtcatgtggttctacacagggtaccattatttatttagtcccctattgctggaccctcatggccaaggctgccagtgggccccttcttccacagtgacagtttgttctgggcacctggagggccccactcatccctcctgctggctgggatatgtgtaccagtggtaggaagtcatcccacagcacctgcaccaagccagcatcctgggggcaggggagacaggacagagggagccagccctgctgtcattttagggcacaaattccccactgagggatgcagagaccttttcacgaaagataaatgtgcttgtgttgtgagcggctgttattttgggactggagcccacgcagctcaacctgtatactaactaataaaacgtctgtgtgtaagccaggtgcggcggctcacgcctgtaatcccagcactttggggggcgaggcgggtggatcacgagatcaggagatcgagaccatcctggctaacacagtgaaaccccgtctctactaaaaatacaaaaaaaaaattagccgggcgtggtggcgggcacctgtagtcccagctactcaggaggctgaggcaggagaatggtgtgaacctgggaggcggagcttgcagtgagccgagattggccactgcactccagcctgggcgacagaacgagactctgtctcaaaaaaaaaataaaataaaataaaataaaacaaaacatctgtgtgtagctttggccttagagacattttcgtgttttcattatgttactttttgaataagtagtgtgacgtattcagaggtcagctgtgtggtacaaaattcaaaagccatcaatgggaggcaacgaagttaagtctcattctccctgcgctgaacttctcccccataggcagctcctgttgtggactcttggtgtgtccttccagtggtggcaaggatgggagcatgtgcacatgtgtgcctctgcaggccttcaacacaaatggcagcatgcctcttgatttttcactaacagcatatcctggaggtctttatatatcaaaatacgtagatcaacctccttttagttttattgtatttttttagagatggcggaggggaggtctcactgtgttacccaggctggcctggaactcctgacttcaagtgatcctctggagttgctgggattacaggcgtgagccaccatgttcagctccaacctcctttttaaaaaggcggtgtgtgggtcctttccactcagagactcctctctctatatatagagagagctgtttctctttcccttctcttctattaaacctccattccataaaaaaaaggggggctgctgtatattgtagcattgaatggatacaccattacctcttcaatccatcccctattagtagacagtaaggtagttttaagtcttttgtgctagtacacagggctgaagttaatatccttgtacatgtatcacctctccagactatttcctgatgaatatttaaaaatctttctcagttaagttttaggaaggcagtgtggtgtgttgagatgagttttaaaccaggaaccaagaagcttccttcactaaccctcccttggactttggaagtcagttaacccctctggggatgagtgtctttattggtaaatgaaaaaaactgcttaaaaggagccatttgtctttaaaactcatgatttgacaagtacatactttgtcctgggcctggccccatcctcagggataacagaaggctggggaaggttctgagagggaatagctctgagaaaaccacagactttatgtatcagggactcatcagaccccagggttcttcttgagttcactttttgctgtcacttcctaaggaaaaggggaaaagatacgttttggcaaaggagagaccccagtcctgcttgtcccagctttaagccatcccttctagacactgccacttgctccttgtcttgtagacaacttctcagagctctgtggtatttctctgcttttaaaaaatttatttgtttctttcctctaccatcccagagtggaccatgacctctggctcccttttgaatctgggaggtgcatttccttttgtgtttgaggactccacgttcacctttgtgcttcctggtgaaaagcgccatttgtacagcctcaccaacttgtctttgacctttgactttgctcatagaaattgttttctccgtctctcatctctggcctttgcccttggacacatatcacaggctcatatcacagccttggatcaagctatctcatttctacgtttgagtattacaacttctgttttgttttgtttttgtttttgagacagagttttactctgtcacccaggctggagtgcagtggcacgatcttggctcactgcaacctctgcctcccaggttcaagtagttctcctgcctcagcctcccgagtagctgggattacaggcgcgtgccaccayacccagctagttttttatatttttggtagagacggggtttcaccatgttggccaggctggtcttgaactcctgaccttaggtgatccacctgcctcagcctcccaaagtgctgggattaccggcatgagccaccacacccagccaactttttttctctttttaaaactgtctagaactcagctcttctgagccaccagctccctcgaggctcataagccacggatctgtccctgtttgtctgtcaaatggctgaacaatttgaatttcatcttcaattgtatataatgatcttaaagatatgtaaataacaaatttttaaagcatttaaaatatttcttcctatattccgaccttgcactgtctacaaagccaggtcttacttcacaaactaaacttcatgtgagacgtgtttctggccaatgagtgttatatgaaagtttattatagtttaacattatctcttatcagaattgggcttttgtgtgatgtagacaccaaaattgtttgataattatgaaaggaggaggctggccaggcactgtggctcacacctacaatcctagcacttttgggggccgaggcgggcagatgacctgaggtcgggagttcaagaccagcctgaccaacatggagaaaccccgtctctactaaaaatacaaaattagccagcatggtggcgcatgcctgtaatcccagctacttgggaggctgaggcaggagaattgcctgaacccaggaggcggagattgcagtgatccgagattgcaccattgcactccagcctgggcagcaagagtgaaactccgtctccaaaaaaaaaaaaaaaggaggaagctaatgagatagaatatacattcccacatttcaaatatggtacaggtttaggagaaccaaaaacttggagcaacccaatatgtaagaagagggactagttagtaaactagaccagaagctagcgaagagggactagttaacaaactggactagaagctagcaagggggatcatcaagattcctctcttccagccacgcttgtattgattcccgggcgtattgttcagccattgtctagagctaggcatcctctgctgctaacagccgtgtaaatatttaaattattggctagtctcagtcacctttgtccaaagctgtagcctcaatagctgtagccacctgcctgcttgatggatctttgatgatgatctttgtccctcactggccatacacttttgggacggctctgagctctgagccttctagggcttgtccatgacttactgctttgcacagagacgatgttgctttgtagatacttcctacaccaatcccaagaggagaaggggcacactaagtatgggttgaagctaccagacccatgatggagctgaaatcctactttagatgaggccgtagtgcagccagatgatgacagctagaagggtgtcttcctgctctggactctgcattacacttgggaaaaaaagagtgaagaaactcatactggaattacacaaatgaaccactgacaaaaactcatttgtgtgacttcttcaaaccctgaactgcaggtgaaatccattatcgaatttgatggtcacatgatcaacttaggtaagatgggtgcccctgatccaggatgaggaccaactttggccagtacaccctgataacctgagttaaccttagctaacttccccaacggtgggtgtgaattctcttccagcagcaggtagtgtgatgaacctctgggttacctttgttttttatcaactgtaccaaaacctcatatttttttcctagtagtgttattccttctagtgaagtgttttgggattccaaccagaacaccagggcatgtgcacacacgtagcacaaagatctattacaattccataaaataggtgaataaaaaatgtccaaagatcgcaattaggcagtttacaaaagacctaaaaattgctggtaattatctgaaaagatggtcaacccaaggaagtacataaatgagagacaacgtagggtagtaattatgtggattttggagccaggctgtctggattcaagtcctgattctgccattattaaccatgtgaccttcagcaaattacttaagctctctctatttcagtttcctcatctataaaacgggaataataataataataatagcacttacctccgagtgtgacagtttacaaagttgatatctgtagggtgcttggtacagtgcctgacacatagtaagtgttgcgaagtgttgcctgctgtggtgatgattatgatggtgatggtgatgatggtggtgatgatggtggtgatgatgttggtgatgatggtggtgatggtggtgatgatggtgatgatggtggtgataatgatggtggtgatgatggtgatgatgatggtggtgatgatggtgatgatgatggtgatgatggcggtggtgatgatggtgatggtgatgatggtggcagtgatggtggtgatggcaatggtagtggcaatggtggtgatgatggtgatgataatggtgatgatggtggtgatgatgatgtgatggtggtgatgatggtgatggtgatgatggtggcagtgatggtggtgatggcaatggtagtggcgatggtgatggtgatgatgacagtggcaatgatggtagtaatgatatgatggtgatgatggtggtgatgatggtggcagtggtggtggtgatggcggcagtgatggtggtgatggcgatcaatggtagtggcgatggtggtgatgatgataatggtgacgatgttagtaatgatatggtgatggtgatgatggtggtggtggtggcggtggtggtggcagcagcaatgccagactgctttacaaagtggttgtttcagtttacattttaccaacagcatgtgagtgttccctttcctcacgttcttctgatattcttagattttaaaatgtttgccaaatcaatgggtgaaattgagcatgttttcttaagcttattggttgttaagtctgcctcttttgtcaagtgcttattcatattgtcagcccattcttctgtcagtcttctttttcttaatttttttttattgatttctcattcatctagcaaatattgaggatcttttatatgtcagacactattttcggtgctaggaatacaatagaaaacactgttttatggatcttatgttctagttagagagagacaatactgttccagctagcaataaattatatttaaaaactaaagcagtacaatcataataatagctggcttgtaccgaatgatttctgtgtgccagctactatactaaattcttagatgtatgaattcattttatcctcacattttttctaatactatttatttatttgagacagggtctcactctgttgcccaggctgactgtagtggcacgatcacggctcactgcagcctcaaactcctggactcaagtgatcctcccacctcagcttcctgagtagctgggaccagaggcacacacacaccaacttgcccagctaattttttattttttgtaaagactaggttttggtatgttgctcaggctggtctcgaactcctggactcaagcagccctcctgccttgtcctccgtcccaaagtgctgggattacagacatgagccaccacacctggcctaatactgttttttgaaaacatccttttacagctacagaaactggagcacagagaggttaagtaataaactcaaagtcacacagctgagaacttgtggagtcaggattcaaagccaggtagtcaaactctacttaatgcctgcagtcctggccagaatataatgttgtctttctataccatcctagagataaaatgtgaaagagaaaagacctttgtatatattctggctggtaatactttctcatttgtgttataaatgtctaaccttattctgtaacataaaaatttttttataatcactttaccatgaaatgtttaactttggtgtactcaaaagttattatctcttatggtttgtacttttgagtcctcgtttgagtaattgtttccttcacggacattatgaagttatcatttaattctttcacttactcatttgacagatgtttacttgagcatctactaaatgccagacactgttctaggcactagaaacatgtggagtaaatggacatcaccaccttcacttttaaggttttgttttccaagtttgggtctttcacccatttggaatttgttttttttttcatgttgtgggatgcagcaaactaattttatatttctgcatataggaattcagtttttctcatgctatgtattaaaaatttttttttcactactgatttatgatgtgatctttattatatatcaagtttctttactatcatgggttgttactgatatgtctgttgcatttcatggacctgtttatctgttcttcagttccgttgtagtttaataatgttttcctwacaaaggtattgtgattattatacactagttcaaaaatgcatgaaaatacgaatgagaagattacaatcagctatattcccaccattttccatgcaggaacttggaaattcaggggggaaatatttgtaaaataattagtctcaaaccactaatgtttcttgtatttcacagtagagaggagctaagttatccctctggtggtacctgataaaatttaaaattactttttatccttggaattcacataccaaaaattgagctcctttgatgtcactttttttttttttttttttttttttttttttttttttttgagagcgagaggatctttcgctgttgcccagctggaatggagtggtgcaaacatagcttactgcaaccttgacctcctgggctcaggtgatcctcccaccccagcctcccaggtagctgggactacaggcacatgtcaccacatctggctaattttaatttttttgtagagatgggggtctttctgtgttgatcagcctggtcttgaactcctgggatcaagcaatcctccctctttggcctcccaaagtgctgggattacaggcgtgagccgctgcacccagcccgatgtcactcttaagattgatgtgttagttgtatgagactgggctgctgtaatcaacagaccctaacatgggattgaacaacacagtggaagttcccttctcattcatggaccagccctaggcacatgttctgacgatggtgagggagttctccttcattctgtcatccagggtcgagactgcgccatcgtgtggctctgccatccttggggctctcacctatgtctgcatccagacagcacaaaggacaggaaggacatggagaagccacccataggggtttctgggcagcaggaagtgacacacatcacttccgctggctggaactcagtcagtggccacacctggctacaaggcagctggcaagtgctgtccagctgtgagtccagagagagaaacgatgggttttgtggatgtcatcctggaccacctgtaaagcgtttacatggctctgttacattggccctcccattaagtcttgtctgtagtttccatgaatacttctttgaagagatttgctggatgtgctcattaaatttttgccatttccatggctgagaaggaatgtgttcgtttctacttgaggtctgaatgtgccactgattctctctggatggaagctgaagtgtgcgggctttcagaggtggcaaaactgagagccttttctttgtggacctttcaagtgaaaccctggggaagagggaggtgggacttgagttcttgaagaccgaggaatctttttaaagggccacatgatatgcagggctgaatttccatgacttggtaatcagccttgagtactgggagtctgaattagtctttcttcattggatttccagggagagtcttctcttgggcctggatttgccttcagtatctggaagcccgcttagcacctctcccacccaggcacgggggcatctctttctgtcatgcgtctccctccagagtacctggagtcctgtgggacgcagacccctggctaagcagccacagctgactcctgatctrctctggccataacatcatcctgtcacccccagggacaggagtgtcacctgtcaacacttctgtttcatttgatataattcacataccataccattcactcatttaaagcataccattcaggccagacttggtggctcacacctctaatcccagcactttgggaggctgaggcgggtggatcacttgaggtcaggagtttgagactgtcctggccaacgtagcgaaaccccgtctttactaaaaatataaaaattagctggacgtggtggcacgtgcctgtaatcccagatacttgggagactgaggcaggagaatcacttgaacacaggaggcagaggttgcagtgagctaagatggcaccactgcactccagcctgggcgacaaagtgagactctgtctcaaatactaaaaaccaaaaataaataaagtataccattcagcagcttttagcttattcagagttgtgcacccatcagtacaatcaattttagaacatttccatcactcccaaaataaacccacatcccttaatcatgcccaagccctccatcttcccagcccctgaccaccactaatctagttctgtttctgtggatttgcttgtcaggacgttttatagacatggaattatacaatacatggtccttggcaactagtgtctttcacttagtgtagcgttttcaagatgcatccattcatgttgctgtttttatcgactctttgttttttttattgctgaataatccatcctatagatggaccacatttcctgtcttcattcataagaggatggtcatttgggttgtttccagttttgggctgttatgaatgatgctgctatgagtatttgtgaacaagttcctgtgtggacataagttttcatttctcttggttatgtacttacgagtgtaatggctagggtatacagggaatctgtgtttagtgttttgaggaactgtcagctgtttttcaaagccgctgccccattttacattcccatcaacagtgtatgagggttccagcgtctctccatcctccccagcactggctctttcttttttttttttgagacggagtctcgctctgtcgccsaggctggagtgcagtggtgcaatctcsrctcactgcaagctccgcttcccgggttcacgccattctcctgcctcagcctcctgagtagctgggactacaggcgcccgccaccacgcccagcaaattttttgtatttttagtagagacgcagtttcaccatgttagtcaggatggtctcgatctcctgatctcatgatctacccgcctcagcctcccaaagtgctgggattacaggcgtgagccactgcacctggcctggctttttctttttgattataattatcctcatgggtatcaagcggtgcactggtcagctcttattctcaaagtctcgtttccttcatggcctcaggaaatggaaaagtagctcttcctcactgaagggctgggaagctctgcctctcatcattgtataaatgctatcagatatgtctgggagtttggaggctgggatgaccaacttagtgcccatttctgtagctccctgtcaatttaaagttgagatgaaagagagaaaaagaaaaactcttgctgaactagagtaaacaaaaatggtgacgctttctccattatgccaaaataagaatataaattttagcaacaccgtttggaagaaaaaaaagttttgatgtgtagcatcaattaactcccaaaatggagttttggaaacctcattgaacaggcattgtaagttatagaataagtgatataaacttacttaaggattttttggtgaaatagtctggtattttaattttttaaaatgtctccagatcccctcaagtttccatgagtttatctgttttagagactattattattgttgttgtgttgttgttgtagttgtttttgagacagggtctcactctgttgcccaggctggagtgcagtggcatgatcatggctcactgcagcctcccaggctcaagtgatcctcccaccttagcctcccaagtagctggcaccacaggtgcacaccaccatgcccagctaattttttactttttatggggacagggtctcactatattgctcaggctggtctcaagagatccttctaggctcaagcgatcttcccgccttggacccccaaagtgctgggattataggcgtgagccaccatgcctggctgagcaaattactaactgacactcaggacaaatatattttcatccagttggataggcatctacttcaaagcatccttcccagtcactgccttttattctgtatctctctgtaaccaagcttcttggaaatttggagatattttaaagtggaagtattatacagaaaagctgtgaggtcccaggctcctagtggtttctggaaagccataaccagtagcagttagaatacatggtagaagtgggagagggataatcccctaggttgtgaagtcacaggcatgtccaccatgattttggtccctcccacccagcctgtggccccaagataatgctgaacacatagtaaatgttcaataattacttgatagtaagttgcagtaggctttaccattgaggttgaaacaatggtagctttcagaagtattttatggcctgggaatatgtgatggcaccacctctagagccagacttatccactcattcattccacaagcatttgtattagtatgtactggtgtgaggcattggagaccttagggacgcaattaagaatagacttcttaagtagcacatacaaatgcatacataaatcacactataacagtacaacggattcaccaattcacagggtgccagcaataggaacaccgggagaggaaagcctaaaatagtcctactcccaaaccagagaatatacaaaactgaacgtatctgcagcatatttctagctcatgtacctggctgtgatatgtttgtttaatcccaattgctagtcagatattgatgagtgtccttggccaccaggtgattttaaatataaacatcatgatagcacaaatttgattctattgatgaaaataaactgcttgttgtgaggtggcaaaaccttactatttttaaaccactagggtaccatttgacaaagtcttaatgtatcttccaaaataagcactgttttctattttagaattggagtggaaatatgaatctatagctcaagtgctcagttcttttttctttttctccagctctgttgcccaggccagagtgcagtggcacaatcttggctcactgcaacctccgtctcccaggctgaagctatcttcccacctcagcctcctgagtagctgggactacaagtgcgtgccactgtacctggctaatttttttttttccttttggtagaggctgggtttccccttattgcccaggctggtcttgaactcctgggctcaagctatccacctgcctcagcctcccaaagtgctgggattacaggcatgagccactgtgcccaacagcgtgcttagttcttaaacagtttctctcactattgcacatgcctttcatatttggatgtcacagaggaattatccattttaaatggaaaagttcattactttaaaacatgaataaccagtggaaagaaaagttcctttataacctagatgctaggtaacaaaactagcactttgtgttttgtttgtgattgtttgtgacagggtctctctctgtagttagacayttaaagcttttcattgttagcccccctagtaaaaatctttatcagggaacatttcctcctctgcaaaaaagtggtttgtttagttctgttgcttcaagattagtgttctgtcgtacccaagagatcttgataatggagtttttcatatcatgtatctctcctcccgaaagctgacttaaacgtagattaggagagtagtgataaccgtggaaactattttacttcagttataaaatgtggtttatctctgcaatcttcctgcttcgtgacttctaagcacctgcaggatgactgagcgggggctggtattcttctgcattgcctgttaccgtcttcactccactaccttttattcctcacctacatcctaacacagttattttctactgcatgtaacagctgtgttttttgaaatgattaattgtatgcaattcaatttcatttaatgatttttgtttgttggttggtttcaccatctttgcatttcctgcagaagtcctggagggtatttgggagccaaaaagaaaaagaagaaacagaagagaaaaaaggagaaaccaaattccggaggcaccaagtcagactcggcatctgattcccaggagattaaaattcagcagccttcgaaagtgagagctctgttttattttttcctctgtgtggtttctcgtgcatgagtgggtttacgcagtttagcgcgctgctgcatcagatgtgtagggactttgttgtgactgtgtgttgaatgccactagtaactggaagctcttgacagcctccttaaaatggactttggcacccaaataacgaaggggtacactgtgcttttgtgtgtgtgtggatacctgctgtgtttttcccttttctcagtgaatttgtatttagattgtcgttctagaagaaagtctcagtgtgagcttgttaggtttttttgaaattacactttaatatttgattacttttcgttcagaagatattcacattgtaatttttctgggtgtctgtctaattacctgaatagcacaacaccatctggcagcagatttcagcgggagcagccatgggtaagtctctcgttgactttgaattaaaccagtttgcagcggtcgttcttcattctaatgccaagggtgggaaatagttcctgacattctcctagtttaaaccaaaccagaagttgtccagctgggccccgtgttggcagatggtggccaagaagagggttgattgtactgcgtgggtgtctggtggcacagatggcagccatccctgtctgtggagccaacccccaggcaccctgtatgctgggcctctgggaaacacaaagccctcttgatgcaagaaactcacagtgaaaagggtagaaccagccaggcacggtggctcacgcctgtagtcccagcactttgggaggccgaggtgggaggatccattgagcccaggagttcaaggctgcagtgagttatgatcacaccactgcacttcatcctggacaacagtgagagaccctggctgaaaaaaataaaaaaagaaaaagaaagaaaagaaagaaaaggggtagaattagaaatattacaaaatagagatgattttgatgatcgtacctacaaataaattattgtgaataggctgggcacgatggctcatgcctgtagtcccagcactttgggaggccaaggcaggcggatcccttgagcccaggagttcaagaccagcctgggcaacatggcaaaaccctgtctctactaaaaatacaaaaagttagttaggcacggtggcatgcacctgtagtcctagctacttgggaggctgaggtgggaggatagcttgagcctgggaggtggaggttgcagtgagccaagatcacgccactgcactgcagcctggcgacagagaccatgtcaatcaatcaatcagtcaatcaatgtgagtagcatgtggtattgtggaaacagctcaaggggtgatgtctgagaccttgagcttggtctctgcccccttgctcactagttgtgtgcctttgcctgggtactgcacttccttcagcccagttccttctcttctctctaactcgcagttcgatcttgaggttccagttggagcatttttattgaagagtttttacatcctaaaacagtgcatatatatatatatatatatatatatatatatatatatatatatagtagttgttaccattctacaagctttgtggatttccttttttcttatgcagagtttctgttgtgttccatgaagtgagacttgcaggtagttttgatgttgtcacctgttttacacaaaagaaccaggaatcactgagaaggaaaattacttgccccaatttttccctgactgactgcagggtgagaagaaaatggaatcttcttccctagcttttcaacttggttctcgggtaataaatatgctacccactagatacagctttccaaggtaactcatagaggataccaccataagcttgcaaaacactcttcccgtttctaaatgtcgcttcatcagataaacgtggcatccctgacctgcagcgtggacatctcctgttgctttcagcatcaccattggtctctgcccatcccttccacctctagtgactgtgagcctttcccctctctctggtcacttatgagaaactagagccaagccaggcagtggcgaactcttggcattatatggtaggtgtattggtcagggttctctagagggacagaactaatgggatggatggatrgdtagatagatagatagatagatagatagatagatagatagatagaggggagtttattaagtattaattcacatgatcataaggtcccacaataggccatctgcagtctgaggagcaaggagagccagtctgagttccaaaactgaagaacttggagcctgatgttcgagggcaggaagcatccagtatgggagaaagatggaggctgggaggctaggccagtctctcttttcacatttttctgcctgcttgtatcctagmtgcactggcagctgattagattgtgcccacccagattaagggtgggtctgcatttcccagcccactgactcaaacgttaatctcctttggcaacaccctcacagacacacccaggaccaatactttgtatccttcaatccaatcaagttgacactcagtagtaaccatcacagtagggaatttcttttcttaatttggaggaagtcagtattgtcttaagatgggcttttttctgctgcatttttaaaatctggggctctttccctttaagcttatgccaactctagatagcactgtaaattacagtggactgcattgcagaatattctggtctacatacaagaaccaaaataaaaatgatatttggattcttataaacttcttagtgttataaaacttggacattttttccaaggtactattaaatttggaaaacaatgggtaaagagtatagttgctggttagtatgccacagaaagcatgtgtggaagaaaaagagaatatacctgcctcttatataggagtggaatcgtgggaagttaatgtcgggtagatattcatctcaccttgcctgatgcacactcattcttcccaggtagtgctactatggaaggtgaatggacaggcatgagaaatgatcatagctgagtttcccttactgctttgtccctgtggatttggaaattgtgtttatttgaatctactttcagaaagcatttaaatagagccgtatgtggttgttcatgcctgtaatcaccacattttgggaggccaaggcgggcagatcacttgatgtcaggagttcaagaccaggctggccgacatggtgaaaccctgtctctactaaaaatacaaaaattagccaggcgtggtggcacaagcctgtaatcccagctactcaggaaactgaggcaggagaatcacttkaacccaggaggcggaggtcacagtgagccatgatcatgccattgcattccagcctgggcgacagagtgagactctgcctcaaaatgaaaaaaaaaaaaaaaaaagaagaagaagaagaaagaaagcatttaaatagtgaacattgggatatcaatgtttcgcaaagggacatttcatgtagaggtgtgctggtcaacccatgagctaattaggtagggaataaatcactctgaagtcttcttcatggagttggtcattttggtcattgggtcatgtggaacaaagatgctgattcatgtctgttgcaaaatagtttgagtttgatatattactgttagaagatttaactcagaaaccaggaaagaaatcaaggaacaaaaaattaaatcaagaaagaaaaagtaccatgacaaattcattatagtcattgtagttctatttttataagactgggctctactttgccattttaagctaaactgatgcacagttaagcattattagttgaaatatgctgtgatctcaattcctatttaaattgtaaggtcttctaatagatggtgttgttggagttcagatacacatgaatttcattttgctagaaatttgctccttttaatgttggggacttaaaagacacccaaggaaaagaagtcatccaaagatataataatgagaaccggaaaagtattttgttaaatttgtatgtgtcattaagataggacctttatgattttgatgttaaacaaatgtaagataaacagcttacaaaaactgtggccatcttggattgtgctgtgagacttccaagcagagacaaaaagactttcacctgcctccagctggacttcagaacttcgtttccttagggttcttgacagtgtttgtatgaaacaaaccctgttctgtgctgtgtamgatgagtaagcttcccaagttaaaattattgctccacaccacagatttcagattccaagtggaacagaagtccaaagttgctgtttataaacttctaagggtcgattgtacctttcaatggtgtccaccctgtgttgacatacagcaaaaccgaagggctcttgaaacttctaaccactttctgaattacagcgaagaatattctttgcatggtatcaaagttctacaatgtctcagtaattttacatattgaaaaaagtcattgatttccatattcagtcctctgcgctgtcttctcatttcaagtagtctcatgttccatgtattattacgttatttgaggaattaaaaaaaaaaaaaaaagaactggggaatctccaagagctggcgggaatattggctttgagaaaggaaccttagaattcaaacgtaatgttttacctaaaaaggagtccagtttccaacacttgggctgggaacgacaggctatggttgcccaggatctgaagtacagaggaaattgcttgtccttctggtgggagagtttgtctctagaggatcaggaggatcaggagggtcaggagaagggcagggtgtggccgggaggaaggggcatggttagagatttcttttcttgatcattttcatcccagttcagcactgagttcagatttcccttccttccttccttccttccatctgtccttccttcctcctttcctccctctctccctccctcctccccctgtccctctccttcctccttcctccctctccctctctgtctctcccccctaccttccttccttccttcctccctcgctccctccctccttttttcttttcttttctttctctctgtctctctccctttctctttctctctccttctctctctctccctcctttcccttcccttcccttccctttcccttcccttcccttcctttccctttccctttccctttcctgacagagtcttgctcttgtcacccaggctggagtgcaatggcgcgatctcagctcactgcaacctccacctcccaggttcaagcgattctccctcctcagcctcccgagtagctgggattacctgccatcatgcctggctaatttttgtattgttgtaaagacaaggtttcaccgtgttggccaggctggtctcttaactcctgacctcacgtgatctgcccacctcggcctcccaaagtgctgggattataggcgtgagacaccactgccgatcctctctctttctttctctctctctttctctttctttgttttctctctctctcttctttccctcccctccccttcccttcccttctctgctgtgtttccattctagaagttctttccttcatcccctcgttgctcctgcagagcatttactctgacagtgccccccmcccaaggctcgtggctgcctggctgttggatgacagtaatgcatgcaytgcacgtctcccccagaggagtaatgccggggaccatttgtagatggatgggaaactgaagcaaagcgtgcttcaatttagattccccaaactgccagagccccaataaaactagacaactgttgttacctttaacagagggtttgcttctattttcatgtgtaacacacaagcccatggccttgactgggcttggaggaggattgttagtgtttaggtattgtagtctctgaggcagatgcacgtgcgtctgctcaagtttaacatcagcagccgctctctcatattctgtgtctgtctttgctgtcgtagaatcccagtgttccaatgcagaagttgcaggatatccagagagcaatggagctgctatccgcatgccagggcccagccaggaacattgatgaggctgcaaagcacagataccagttttgggacacacaaccggtaccaaaactaggtaagtttttctgcttttctctttttttccccacaaacaaagctggatgaacaacaacaacaacaacaacaacaacaacaaaacacaaagagtgttaacttcacatgtatcatttatttcataccacagattggaaatctatgcaagactaatatttttcttctgaaaatataaatattagatagtgacattggcttttgataaccattattttagtccaatttctatcccaataaaaacatccaatttccccacacttgaaacattactagtattattattatttttgagatagggtctcactctatcacccaggctggagtgcagtggcatgatcatagctcactgcagcctccacctcctgggctcaagtgatccatcctcccatgtcagcctcccatgtatctgggaccacaagtgcacaccaccacacctggctaatttttgtatttttttgtaaagacgctgtttcagtatgttgcttgggctggtctcgaactcctgggctcaagtgatccayctgccttggcctcccaaagtgctgggttacaggtgtgagccaccgcacctagcccattagagtattaaaaatgtatataaggttctgtgatggaaggaccaggccctgaaggtccctcatggagcaggtgtctgttgagtgtctgttattaaatgccaggcatagtccagggcacacacctggaaacagtggtggaaaagtaggacaaaaggtggccaggctggggaggagcggccacactgaggtagagaaaggctttagttaagcaacagatgctgggagaaagtgacgtgtgatgcgtaagcttctgtcgggaattccaaggggcccgtcccttgaggaccagagggcctcaagcctaaggaaggcaccaggaaggccctgagctgaggcctgccccggtcatcatggccagagcactgggagcagggggcagggagggtgtggagaggggccgaggcaggcagcagccatggggaagagcctgggttttagtcctaccatgttgggaagctctgcagagaaggacttggaaaactcttcttggtggaaatcactagaaattgtgatggcctgaactacgctgctagcagtttagatggggagaagtaaccagccttgaaattatttttaggttttgctgggaggggcagaggtcaccgcagccctttcctctcccagtttgtggaaatgcagtaaaaagaacacacctcccaaggctgttgaatgaaacctacattgcttatgacagtgtgtaagataaggctgcattgtaggccttgagactcggaatcactgttgttttgtaatgtcatctttgtcactggatgacaaaggatttctcctttcatttaattggcaaaataggccagctgtggtggctcacacctacaatcccagcactttgggaggctgaggtgggaggatcacttgaacccaggagtttgagatcagcttgggcaacataatgagactccgtctctacaaaaaaaatttacaattagccgggcactgtgttgtacaactctagtcccagctacctgggaggctgaggagagaggatcgcttgagcccaggagttgaaggcttcagtgagccatgattgcaccactgcactccagccttggcgacagagtgagaccccgtctcaaaagaaaaaagaaaagaaaaataattggtgaaacagcaatgatttcacaccactgcctagctttcctgtttcagtccagaggcgcttgatataacagcatctttttaaagattatctgaaacccgagggccctaagtcagatttkgcttatgtcactgaccactttggatggttagaatactttgtcatttaatattctcgctttttgcctttcttttttctctttctctccctgttcagatgaagtcataacatctcatggtgcaattgaaccagataaagacaacgtacgccaagaaccgtattctttgccacagggttttatgtgggacactttagacttgagtgatgccgaagtggtgagtgagtaaaaacctcttaaattcaactcctgcatycacacattgcttctaagttgattctgagcaccatggataggacacttgttttatcttatagctcaaggagttatacacgttgttaaatgagaattacgtagaagatgatgacaatatgttccgatttgactattcaccygagttcctgttgtggtaagtctcatcgatcacagatgtcgtggataggcgctgytgacytggggactcctgcgtctgttcctgtgttcttggacaataactggtgcctgttttcttgtctaccgtgacctcagggctctgcgtccaccaggctggctcctgcagtggcactgtggggtcagagtgtcttcaaataaaaaactggtcgggttcataagtgccatcccagcaaacattcggatttatgacaggtacatgtttaagctcgtccatgcggtttttatatgtttattttctaagaattacaattagattaggcctttaaaagttactgaatgcaggccaagcgcagtggctcacacctctaatcccagcactttgggaggctgaggcagatagatcacctgagctcaggagtttaagaccagcctggtcaacatgggtgaaaccccatctctactaaaaatacaaaattagttgggcgtggtggtaggcacctgtaatcccacctactcaggaggctgaggcaggagaattgcttgaacccaggaggcggaggttgcagtgagccgagattgcgccactgcactccatcctgggcaacatgagcgaaactccatctcaaaaaaaataaaaataaaaataaaaatgactgaatgcaagctgtccggtgatcagggaggttgtgtatgtgtggaggcagaggctttatggaaactctctgattggttttgctgtgaacctaaaactgttttaaaatataaatttattaagtagtaaagaaaaaaaaacggactgtgaataaaaataaaggacaatggtttctttttctctttttctctctctgcctctcaatctcatacatgctcacacatatatgtatcagaaaaaacgaagccttggccaggcacagtggctcacacctgtaattccaggactttggtcggggccgaggctggcagatcacttgaggtcaggagttcgagaccagcctggccaacatggcgaaaccccatctctactaaaaatacaaaaattagccagcatagtggcacgtgcctgtaatcctagctatttgggaggctgaggcacgagaatcacttgaacccaggaggaagagattgcagtgagccaagattataccactgcactccagcatgggtgacagagcaagacttcatctcaaaaaaaaaaaattacttaaaaattttttaggagagataaagctttctctccataggatacattgcacttttagtttggatctccagcccggaaagtcaaagatccagctatgaaagtcaaagatgtcatatataattggtctctttacttgtcagtgtattaggttagcttatttactgtgaaaagcatttgatctcaaggaatattttgtgccaaatgaagtgtgtacctggaaacagaaccaggaacaggatttgaagatctaggaggtttactgtagttcagagcgcaccagctctggtctgctcaaagcccctctcaggggtcccaggggtttgtatcacactccaaagcaacatcttatcagattctgcaccaggatgactcagttattaccataatttaggaaaaacagatctagaaacttaaagacgggcaggtcgtagtgattcatgcttgtaatcctagcactgggaggctgagatgggaggattgcttgaggccaggaggtcgagaccagcctggtcaacatagcgagacctcatctcaaaaaaggaaaaaaaaaaaaaaggaaagaaacgtaaagagccatagctgatccattttctaaactgaaaacgtataayggaccaaagtcccaaaatgtatttagaacaagagggttggagcctccgtgcgttttacaatcattttggcagggagatatggggaatagtgtttccgtctgaatttgtgaaatgtctaagtgatagaatatttttgttaaatattgtgttaaagaatggctttcaggccaggtgcggtgggtggttcacgcctataatcccagcactttgggagatcgaggcaggtagatcatgaggtcaggaatgcgagaccagcgtagccaacatggtgaaaccctgtctttactaaaaatacaaaaatgagctgggcatggtggcgtgcacctgtaattccagctacttaggaggctgacgcaggagaatcgtttgaacccaggagtaagaggttacagtgagccaagattgcgccattgcactccagcctgggtgacagtgcgacaatctgtctcaaaaaaaaaaaaaaaaaaaaagaaagaaagaagaaaatagaatggcctttatgttcttttttttctttttctttcttttcttttttttttttttttttttttttgagacagggccttgctctgttgtccaggctggagggcagtgatgcaatcatggctcactgcaccctctgcctctcaggctcaagtgatccttccacctcagcctcccaagtagctgggaccacatgcatgcggcaacatgactggctggtgtttgttttttgtagagatgagagtctcagtgttgcccaggctggtctggaactcctggtctcaagcaatccacctgccttggcctcccaaagtgctgagattacaggcgacagccagtgttcccagcctgcattcttattcttggatatttcctgggtatcatcttattttttwaaatgtgttgactcttcattttgaatctcgttttgactcttaatcttcaccatctttatttcttagtgtgaagaagatggtagaaatcaactttctttgtgttcataagaagttgagatcgaaacgggtagccccagtgctaatccgagagatcactagaagagtgaacctggaagggatcttccaggctgtgtacaccgcgggagtggttcttcctaagcccatagccacatgcaggtaccagtaccatatttctacctcaggtcctccctttatcaaaaatgttgagcctcaccactgttctgctagatgtagtttttgctggtagcagagatggagactagaacctagaatcaccaagtccagtattctttctggtatatcatttgccacttggtgattaaaaaaaagtttttgacattttcctactaatgatgctggatctatacttttttttttttttttttttttgaggcagactcttrctctgttgcccaggctggaatgcagtggcgtgatattggctcaccgcaaactcgcctcctgggttcaagtgattctcctgcctcagcttcccgagtagctgggattacaggcatgtgccaccacacacagctaatttttgtatttttagtagagacagggtttcaccatgttggtcaggctggtcttgaactcctgacctcgtgtggatctatacttctaagtctattccatgtgaaagatgaatgctgtctctacatgggaaaacctaggacatgatgatcttaaaattccaatgtcataccattttctttccaccccaaagatcagttttctgccatgctttgcagcaccaccaaagtgtcctgaaagtctaataagcatccattcaaaagcctcagatgtatttgtttgttcagagtaggaagacctaagctatgtttttacaacttcgtctgcactagtcaagctttcacaggttattccagtgagaaaatgatcagattcccacaagactaacctgtttctaaaacatcagagtttatctccccacccctcaccactgtttttattgactcaaataggatgaaacttaaaattactatatcctgttaaattattacattcgttaagtaaatggaatactagacttcaggggtatattttaatataaatcacttatcccagagcctggaatcactgaagaaatttaagctagttttcaaaaagttgttttctttggtgtgtaggctgtaaaagtgaaggtgactaatttaggggatttattttcatgtttttaaactttctgattggccttttgtagaatcagtgatggtccttacacacttggaaacctgggtatgattaatatttcttttttgtgtgtgtgtgagacggtcttgctctgttgcccatgctggagtgcagtggcatgatctcggcttactgctgcaacctctgcctcccaggttcaagtgattctcctgcctcagcctcccgagtagctgggattacaggtgcacaccaccgtgcctggctaatttttgtatttttagtagagatggggtttcaccatgttggccaggctggtcttgaactcctggcctcaagtgatctgcccacctcagcctcccaaagtgctgggattacaggcatgagccaccgtgcccagccaactaatatttcctttgcagttttaagattccactttagtgaaaaagatgaaaggtcacaaactcctgaggaacataactggagtataagatgtattttagagattaaaactggacggataaaatgatgacataggatgagggcctctgtctagtacaacgtaagtattcagtaaatgcttatgtaacagccaagctgagacaaagagtgaaaacttgtagagttagaaatcaatttgattttaaaacctttattgtattccagatactggcatcgatcactaaaccccagaaaattggtagaagtgaaattttctcacttgagtagaaatatgactttacagagaacaatgaagctatacagacttccagatgtaagtaagaatgatttgcagttttttgaagctgtaacaactgacgcttttaatgcagaaaagaattatttgcaggagtctaaaaactgactggtgtgtctgaggargtgaatatggagcgaaagagatttcatggaactcgggagctagggaaggtagggagtttgtttggaaatgccaatctttccttttttcccaaggctcttaaagttgtttcattggtagttggataagactgaactcaaggcaagtaagttttgaaatttgggaaatttatggtctgttaagtaagaaggaagaaaagtccaggctgctgatctcttaatgcgttggaactcaggaatcaagtgtagaggagagacccagcgagtggaaataatgtctcattaaattatcatcttcttaaactatctcgttctcaatgtgaaaagttgtcattttttttttttttrgagacagtcttgctctgttgccccttcagcgcaatggcacaatctcagctcactgcaacctctgcctcccgggttcaagcgattctcccacctcagcctcccaagtagctgggactacaggcacccgccaccacacccggctaatttttgcatttttaatagagatggggtttcaccatgttggccaggctggcctcagactcctgacctcaagtgaaccgcctgcttcagcctcccaaggtgctgggattacaggcatgagccactgcacccagcgaaaagttatttatttattttattttatttatttatttatttatttattttttttttttttttttttttttttttgagacggagtctcactctgtcgcccaggctggagtgcagtggcgggatctcggctcactgcaagctccacctcctgggttcacgccattctcctgcctcagcctcctgagtagctgggactataggcgcccgccagcatgcccggctaattttttgtatttttagtagagacggggtttcaccatgttagccaggatagtcttgatctcctgaccttgtgatccgcctgcctcggcctcccataatgctgggattacaggagtgagccaccacgcctggcgaaaagttattttttttatttttttattttttgagacagagtctcgctctgttacccaggctggagtgcagtggctggatgttggctcactgcaacctccgcctcccgggttcaaacagttctcctgcctcagcctcccaaatagctggaattacaggtgtgtgccaccacacccaactgatttttgtatttttagtagagatggcgggggtttcaccatgttggccaggctggtcttgaactcctgaccttgtgatccgcctgccttggcctcccaaagtcctgggattacaggtgtgagccaccacgcccagccaagttatcatttttaatagggaaaaatataaatgtgctttctagacttggctttatttggggcttggctatattagttatctatggccatgtaaaaaatgaccacaaactgagctgcttaaaacaacatttattatcacacagcttctgtgggccagaaatccagtcacagcttagctgagtcctgtgctttgttcagggtctctcctgaagttgccacccaggtgtcagccagggctgaggtctcatctgaaacttgactagggaaggatccatttccatgctcctgtagttgttggcaggattgagttcctcactggctgttggaccaagggcctcagttctttgccatgttggattctccatagggtagctcacagcatggcagcttattcatcaaagccagtgagagagagagtctatagagaggatctgctggcaagatggaagtcagaaccctatgcaggtgattcatgaaagtgacatccagtcgccattgccatttctttttttttttttttttaagatggaggctcgctctgttgtccaggctggagtgcaatggcacaatctcagctcattgcaatctccgcctcctgagttcaagcaattctcctgcctcagcctcccaagtagctgggattacaggtgtgcaccaccacgcccagctaatttttgtatttttagtagagatggggtttcaccatattagtcaggctggtctcgaactcctgacctcaggtgatccacccgcctcagcctcccaaagtgctgggattacaggtgtgagccactgcgcccagccgccattgccatttctattggttagaaccaaatcacaggtcctgcccacacgtaacaggagcagatcacaccagctgtgaaccccaggaggtgggatcactgggggccatcttagaatctgtgtgccactgatgggatcttttgtttgaagtgttgtgacgtgtgaattgaaataaaatcttcggccaggcgcggtggctcacacctgtaatcccagcactttgggaggccaaggcgggcagatcacaaggtcaagagatcgaggccaccctggccaacatggtgaaaccccatctctactaaaaattaaaaaattagctgtggatggtggcacatggctgtagtcccagctactagggaggctgaggcaggagaatcgcttgaacctaggaggcacaggttgcagtgagctgagatcacgccattgcactccagcctggccacagagcgagactccatctcataaataactaaataaataactaaatacatacgtacatacatacatacatacatacaaacttcaaaaatgcctctttttttcactatgggcaaatgctgttccactttggtctctccaaatttcagtttcttgaacctcaagcagcctagcttatgtacaaggaaaagacacacttacatgtaggttgcctacaatggagtgaagaataaggagttttagcacataccattggtttactcacaatgattttcttaaagtgctaaagctatttttgacttgactccattcatcagccttaatatttttgtacaagagtcaatcttctcctgggtataggcgtgtattatgaaaccagactgtggcatcttacttccagtgaacctgggttcctggtagcagtcctgttccagtcgtgctgtgatagtgactgcctttcccccacccataaattgaaggttatgaagtgctttcaaatacattattcaatttattctcacagcaaccttttgaagttagtacttcttatccccattttacagatgaagaaactgaggtatgtgacagttggcacttaggcgaggatgtgttaatatcaccaagtggagggcttgggatgcaggccccagacctccatgtttccctgttagctccctctgcctctgccatcccctctaacattacccactatggggacaccatggctcagccccactgaatgtctcactgtgagtacagcataaatcaaggcagaaaaggacgattgtcaagatgcaaacagytctcattggcttgccccagtctcctttcccccttttaagtcataggaaaggaaaggaaaataaagagtaaattaatagaataaaagagagattaaagtacagatattatgaaattggaaggtgctggcagcagtcccttgggtgtctgcctcttgagttaaactggacagaactgcatayaccggatgccccttcctctcctatgggcccagatgggtgataccactgctagcagtcaagttatttaagaacatttttgtaccattcagcgtaaaagcaaacttatggaatacagcttttgctgtatagatcaatctcattttctgcttcattgttactctttttgcttgtaggagtgccagctttctgtctttttcatggacttttgaatataggagctaacatttattgtggccggcgttatgctcgacatttaacagccgtagtctcatttactaatcacaacagccacaggaggatgggtccttatccccatagcacagaaggggccatgagaacacagattgacttgctcagagtctgctggccagaagcagagctgtcgcagggcctgcgccattcacaactgttacctaaaatactaaggtttccccaagaaacacgccttacgatgcctccctaccctttcagtgtttggggagattttattttgttttgtttttttgatctggtgttgagtatttccaagttcgattttgcgcatctgtktcaatgagctgaaaggtaatttgatgttgataaaaagcagaagtcagagaatgatccactaaggtcttagcactgtgctgcaaggagggtgtgcttgcttagacatgtcgaggcatataaggtgttctatatttagtggcattagatggtttttttagtggttagcattctgtttgctcctttttgaatcatataaataaccataatcattgcttacatctcttctctggaatcttggctctcaaacggtttgtaccacaacttgacagataacaacactactgttttttaatagagctctgagcttcatttccttatgtacttataagcagattttacacagatttcaatctacgtagaggcccatgaatcatgcatattagttgggccatgggaaaggatatctgattcagatacagagtttgcttatgaaactgagatttttcttatttactggaaatgattctctgcattttattgaactctcagaaaacatgaccgcttcactattccattatacggaagctagccattttaatgtaagcccaatagccttcctgsttctttctgaggacaatagttataatttgagtgtttgttttgcttttcaaaagttaattcttttttttttttttttttttttttctgtgagacgaagtctcgctttgtcgccaggctggagtgcagtgatgcgatcttggctcactgcaacccccgcctcctggatgcaagcaattctcctgcctcagcctcctgagtagctgggactacagccacgtgccaccacacccagctaatttttgtattttagtccatgttggccaggatggtctcgatctcttgaccttgtgatccgcctgcctcagcctcccaaagtgctgagattacaggtgtgagccaccgtgcctggcagtatttcattcttacacagattattttagctattagtcagcaaatgtaaatattcttaccctgttttctaggactttctgttttttatagctggtacatcctggtgtgctcttatgctttaatgcttctataaaaatttgttcaaaatgcttataagttgccaaacttatgatactttttacctgaatttaggcaacatattgcttgtctaaattctgctacttatttttctaacctttagagacctaagatagcagttctcaaagtgtggcccagggacctctggaagtcccccaagatctttgaatctatgcagtcattttttttttttaactattttcataataacactagtatgtaattttttcactttcattctcgtctgagtatactgtgaagtcttccagaggccatgtggcatgtgtatttctgtagtcttttgtttaaaaatgttctcagttttgatttctaatgcgataagtgtggatatgcataacccacataagcaaagctctttggaggtactcaatcattattaacagcgtaggccaggtgcagtggcccatgcctgtaatcccagcactttgggagaccgaggtgggcagatcacaaggtcaggagatcgagaccatcctggctagtacgataaaactgcatctctactaaaaatacaaaaaattagctgggcgtggtggcacgtgcttgtaatcctagctacttgggaagctgaggcaggatcaaatcacttgaacccgggaagcagaggttgcagtgagctgagatcacaccactgcactccagcctgggcgacagagtaagactccatctcaaaaaaaaaaaagagtgtaaaagggtcccaagaccaaaatatttgagaactgctgctttaaggcgatctgctgggcagttcctttagtggtttcacagttggatattcaatgaatgagaattgtgctccagaagaatgttttgctctagaaggaagttggcaaatttttttttcatttctgaatgttctctattaacagatatcatatatcctgtggctttcattaattcatctaattgcttgatattgttgattgttactgaaccagtaacaaaagaaaaaaaattctgatattgagaaaggctatttgaaatttatcaagctaagtctgcctcatagcagaaactaattttttwaatgactatgatatatattttatatggttttggtcttcccactagcatttagaagtgcttatttatttccagtggagatctggacatttctgactcattggttttgagaggtactaaaagactaaaggtatgcattgcctgttaaatgtgaaggacttaaattctctaaatttagattattaaatggcattttagctgaagtgctttagacatgacatcatcataatagaatggcttatagtaaatattcagctgaggactgttggtgtataaatacagagcatgcacctcccattcccctttcccccagctaatcgataatcaatcagcactgtgtgtcactgaagcttagaaaccccagcacagctaatagttgatgacagctggcactcaagagaaaacctattttccttggcctagtgtggtggctcacacctgtaatcccagcactttgggaggccgaggtgggcagatcacctgaggtcaggcattcgagaccagcctggccaacgtggtgaaaccctgtctctactaaaaacacaaaattagccgggcgtggtggcaggtgcctgtaatcccagttactcgggagcctgaggcaagagaatcgattgaacccaggaggcagacgttgcagtgaaccgagatcgcaccattgcactccagcctgggtgacaagagtgagactccgtctcaaaaaaaacacctgttttcccccttgggcttccacctgggggcatgcaggaattgtgatgacctcattctacaggaagtttttcctttaacaatatttcttaagagtggaactgctagattatataaaatttttaaaaataatcatttagggcagaaaaagtagagtagcaatatttatatacagattattcatctcttaaaatgtatctagtgtttctccaagggggggaaaaatcaggtttacagaaaaaaataaactgtatttctcagtttaaaattgtctgtttgttgggcttcctgacttttagtctcaagtcccctggcccctgaacagttctagagagcaaagtgatgtcaggagcttttacaaggacaacagctgaacaaattcaaatggggacctgtcctgacttttaggtgttttattcctatggcttaattttttaaattctaaagctctggagtagtgataagacacctaccctgatcacctttacccagaagatgtggcaggagaggccaggccgcgtccctggcagccatttgccgttagacaagatggacactttcaggctggtatggctgtaaacccgtttgcctttagaaaatacttggctatgaacaatgcttgccttcccatccagcctgatatgattcactcctatatcatttttgttcaagagaacaaaatcaccacacgcttttaatgggctattgcataataaaacaagttgctcagttgtattttcaaaatgtcagacttggcagttttaaagcatccctcagaaaccatgaaggattggttctaggacccctcagataccagaatccttgggtgctcaagtcccttatataagatggcgtagcattgtgtatttgcatataatgtatgcacatcctcctgtatactttatttatttatttttgagacgaagtccctccctgtctcccaggcttgagtgcagtggcgtgatcatggttcactgcaaccttcgcctcccagtttcaaacgattctcctgcctcagcctcccgagtagctgggattacaggtgcatgtcaccacgcctggctaagttttacatttttcgtagagacagggtttcatcatgttggccaggctggtctcgaacttctgacctcaaatgatccaccggcatcagcctcccaaagtgctgggattacaggcatgagccaccatgccccctgtcctgtatactttaaatcatctctggattacttataaggtcaaatacaatctaaatgctatgtaagtagttgttacactgcatttttaagaaataatgacaagaaaaaaagtccgtacatgatcagcacagatgcaacgatccagttttttttccccgaatatttttcgtctaaggttggtcgaacccacagatgcacaaccagtggatacggagggctgcctgtactccagaagtcatgctaagttggctatgtcccatcatgtagactgttaacattcttggcattggtatatacattggtgtgttttgggtattggcgtacatcatgaacttgtactgttccctttgatgtttgtttgggtcatgggcagtagtgaccaaagacttgccgcacagataggaagatacaacacattgtctgtctcgcctatattttaacccagctcttctcaaaccttaatgtatgtacaaacccamggaaatcttgttgagttgcagattyggattcattagatctggggcagggccaggctctgcagctctaactagctcccgcgtgctgctcattctgctggtctgcagaccacactttgagtgcaaagtcgtttcactcctcttctacctgaacttctggatttgttttgtttcccctccaacaaggttacaaagacttcaggtttgagaccaatggaaccaaaagatatcaaatcagttcgagaattaatcaacacttacctgaagcagtttcatctggctccagtgatggatgaagaggaagtagcccactggttcctcccccgggagcacattattgacacgtttgtagtggaggtaaagamaaggtgataaacataaagcttctccttgaagcaccctttgtgttcagcgtgcagcagaaktatttacacacacttccttctatttcatcacagaacattacaaagatgtgtactaaagggtagagagttaataagattaataattctgaatactctatcaaggacatgcttaagtgaaactgccatttgttgaaccatgagggtgtggtrttgaggaatatggtaaccatgagtgtggtctggtgccattgtcttgttttgtgctaaggcaccagcagctttacccacagcactgctttgcaccgttgatgctgatggtaacttgtcaacaaggcaaacaacttcttagtgttatgaaaatcattttgacctcacagatttctgaaagggtctcaggtacccacagggttcacagaccacattttgggaactgctttccagggcatatcattagagctgctgagtctgtggttggacccatctttcacatttttagaaattgccaaatagctcaccacaataaggtcctgagcagtgtaagagagttcctgtttccttgcatcctcacaagacgtgggtatggtcagattttaaatttatttaggcccacctgatgagtatggaacagtatcttgttaatttatatcctcattgttgatgaatttgagtatctcatcaatctgttagccatgtttatttcttttataaacttgctatttacatcacttgcctgttttttttttttgaccgtagttgtcttactgatttatgaaaggttttttgtttgtttgttttgagatggaattttgctcttgttgcccaggctggagtgcagtggcacaatctcggctcactgcaaactccacctcccaggttcaagctattctcctgcctccgcctcccgagtagctgggattacaggcgtgcgccaccatgcccggctaatttttgtatttttagtagagtcggggtttcaccatgttggtcaggcttggtcttgaactcctgacctcaggtgattcacctgccttggcctcccaaagtgctggaattataggtgtgagccactgtgcccagcccgtgaaaggttttttatatgctgaatactaacactttgtattgcgttcctttctgggtcctctatattcyatttcgttgatctccatgtctgtcttttcactaataccacactgacctcgttgctatagcgatataggaagccttagtatcaggtagagtaattcctcccactttattcttgtttgtcaagatcattttaattaacctatttcctttgccttttgcatatacattttagaataagcttatttttgcctacaaaataccttgctggtagtttgatagggattacattacactgatagattaatttgaggataattgaaaagtcttccagtccatgaacatggaatgtctctacatttatttcggtcttttaaaatctcttttatcagcattctctaagagcatccagatcctgtacatgttttcttaagtgtatagctagatatttcactttctttggggcgattataatggtgttgtgtttttaatttcagtttctgcatgttcattgttagcctgtagaaatgctttcttttgtgtgtttgtatcctaccacagtgctgaaatcacttactggttccaggagtttgtgtgtagattccttgtgatttctacatagacaatgtgtcatctgcaaatagggacagctttattgcttcctttccaatctcgatgcctttatttattggtcttgcattaatgcaggacctagatcttccagtgctttgttgagaaagagtggggaaggttgtcatcctcgtcgtgttcttgatggtgggagaaaagcatttactctttcaccatgaagtatgatgttagctgtaggtttttctgtgggtgctcctaatcaatttgaggtcattctcctctatttctaacttgctgagagttcttatgaatgggcattggattttttccagtgctgcttctgcttcaatagatgtaatcatatgatttttctcctttaatctgttgatatgttagattacattgattggttttcaaatgttgggtcactcttacattcctagaaaatatccacttggtcagggtgtataattatttttatacattgttgtattgattgctaatattttgctgagtatttgttgagttcatgagagatatctctctggagtgccttttttgtaatgtctgtctggtttagatatcaagataatactggtctcataataggagttgggaagtattatttcctcttctattttctagaagaaattgagaattggtgttaattctttaaatgtttgttagaattctccagttgaaatgatctgagcttagctgtttcttttttgggagtttttaaataatggactaaatgtctttaatggttatagcactattcagatgatctgtttcatcttggttgagttttaatagtttttgaggagttcatccatttcttctaaattgttgaatgtatgagtgtaattaatgttcattttattcccttgttatccttttagtggctgtgggatctgtactgatatctcttctttcataccagatattggtgattcgtgtcttctctttctttgtttttgtccatattggtagacttgtatcattttattgatttgtttcccagagaaccagacttttgttggatattccctgttgtcttcctgttttcagtgtcattgatttctaccctcgtgtttattgtttccttctgtctgcttgctttgggtttattttgctcttcttttctagttccttgagggaagaacttactgacttgagacctttccctgttactagtaagcatttagttctatcagtttccctctctgcactgctttagctatttctgacrtattttggtatgttgtatcttcrttgtcattcacgtctatgtattttttggtttcgtttgaggcttcctctttagcccacccctacttagaattgtgcygttcaattttgctgtgtttagagattttctgttgtctccctattacagatttctagtttgattcaawtatggttaaagaacacacactgtatggttttgattattttaaggctcttgaggtttgttttattactcgggatatggactgtcttgatggatattccatgggtgcatgaaacgtgtataccactacggttgtgtggagtgttctttgtatggcaattgcatcatgttgattaaytgagttattcagctcttctgtttccatgctgattttctgtctagcagttctatcacttgatgagaggggcatggaagtccccagctgtaattgtggatttgtctatttctccttccaacactgtcagtttttcttgatttcttctgggcctcttgtttgatactcacatgtatattagggtctttgtgtctccctagtggattgatctttttatcataatgtaatacctctctttctaataattttccttgctctggagtatactttattgtatattactgtgaccagacctgcttttaaaaattgtttggactttttccatccttttactttcaaactattgatgttattgaatttgaagtgagtttcttggaaacagcctatagctgggtcatgtttctttacccacactactgatgtttcttttgattggtgtatttagaccacttacataaaaggtgattattggtatggtagagcttaagtctaccatttgattatttggtttctttatgtttcttctggttcttgttcctctgtttcttttttcttgccttgctgtggattacttgaatatattttaggatactgttttatttatagtacctttgggtgtatttgtatagtttttatgatggttgatgtgagtattacaatatatatatgtgacttatagtcgattggtaacaacatttattactttgagtcaccttacttttatttaggtcactttacctttttcatttttaaatattgttgtcttaaatatcagacagtattatgatttttgttttaatcatcaagtatgatttgtaacactgattaataatgatgcttgaggagaagcataatttattatatgtagcccaaatttctactctattattcttccctccttcctgatgcttcaagattccttcttttattatttcctttctatttgaagaaattcctttagccagtctcagggtatgtctgctagtgacacattcttttggtttccatttgtgtgagactacctctgtttttagatttagtttcccaatttttttttttaattttttttggagacagtgtcttgctctgtcacccaggctggagtacaatggtgcaatctctgctcactgcaacctccgcctcttgggttcaagcaattcttgtgctcagcctcctgtgtagctggaactacaggcgcatgccaccacaccctgctaatgttttgtattttagtagagacggggtttcaccacgttggccaggctggtctcgaacttctgagctcagaaaatccasccactttggcctccccaagtgctgagattacaggcatgagccaccatgcccagccctagtttgctaatattttacttaggatcttctatactcactactgaggttggccattaatttccccttcttaccctgtccttgtcctgtcttgataccaaagttagaatgagctgaagagcttgtcctctcttttctctggaacagtgtatgtaataatagggattacttgttccttgaaagttgttagaagttgcttataagccatctagacatggtgccatggtgggttttgttgtgagcgggktttttttgttttgttttgttttgttttgttttttatcagtctttacaattgattgggtgtgagggacaatggaaagatcrtcccactcttccccaacagttggtgattctctggtcattttaacagcaagagaggaaacagtaattttaccagcaatatgaatgtgaagaagtagttttctgaaagcagatgatgaaaatggggtggggaacctaatcaggttctgcaggtgcctgcagtaattcagcgtatgagatggatatgagaaattcttagaagaatctaaaatccttattaaacctgaaggttgaattcatctccaatactgagctgctaatatagagcagtagggaatcactgtagattaacccctttagtttcttgctggctgaagaaaggtctaatgactcggaagcctttgaaaaccaaagcatacatccttctggaatttccttttctgctgaaagaaatactagcagtggcatgtgtgtggtccagcctcttcagccgcacgattcaaacacatcatattctaaaagtcagcaaggccaccacagctaattacaacaacccgaacaatactggctaatttcttgtattggaagctttgccagtgatgatgaaatgaatgtcatccattgtatcccttatttttgatagctgcaaaattctccagttgttcacatgtgtatattttggtgcagtagtaagacctttcacaagcttgcgaactcttccaaacagcttccagactctacccaaccttacttaggcctgatataattctttctgtgtgctaagacagtgtgagatagtacacagtatcttttagttggagaaggcagccctctaatccttaaagcttttatttctgcaaaaacaatgaatctgcttttatcactgttcccttagtctaaagaattgactcatttgtcagcctgagggaagctttccttttaggacattctgcttctatctttctttcttttttttttttttttttttttttttgagtctcatcctgtcgcccaggctggagtgcagtgacacaatcttggctcactgcaacctccgcctctggggttcaagcgattctccagcctcagcctcccaagtagctgggattacaggtgtgcgccaccacacctggctaagttttcatatctttagtagagatggggtttcaccatgttggtcaggctggtctcgaactcctgacctcatgatccacacgcctcatcctcccaaagtgctgggattacaggcatgacattctgcttcctaagaactttgtgcaaatcaccaatgggcacttaggctgaagtcccaactccaggcccttcttggcctctacacagcacaatataaggsgccccaaattggactgycgagaaagaagtgtgacttactgcttttcgttctctggggcaagggagagaacagagttagtggaaatgcacgtatgcagttggttcaaggagatctctgtctgacagcacytttgctcctagagccccaacggtaaactgactgatttcctgagcttctatacgctcccctccacggtgatgcaccaccctgctcacaagagcctcaaagccgcctactcattctacaacatccacacagagacgcccctgctggacctcatgagcgacgcgctcatcctggctaaatcggtaagccactccttcctgttcacgccgtttggttctccaaatgtctgtgccaaactatagaagacatcttactgtgttttcttccacacaggtggaatttatgcgagactttaaaaaaactattgatcatcagtcaaaggaagaattttgataagagtttcttttgaaactttagaggctattttcatcattaattttatggcagtttaacaaaaaagacaaaatgtacaaattataaatgtttaatccttatataagaatatataaggctgggcatggtggctcaggcttgtaatcccaacactttgggaggccgagatgggtggatcacctgaggttaggagtttaagaccagcctggttaatatggtgaaacctcgtctctactaaaaatacaaaagttagccaggcttcgtggtgtgtgcctgtaatcccagctactcgggaggctgaggcaggagaattgcttgaacctgggaggcagaggttgcaatggagctgagattgcaccactgcactccagcctgggtgacagaaactgtctcaaaaaaaaaaaaaaaaaaaaaaaaaaaaawaaaaatatatatatatatatatatatatatatatatatatatatataaagcccatatcttaggaagtaatataaggaaaatattaatacatgagtgaatatttttgttgagtgaataactagcagcaatttttttattcaaccaaatagtctctgaattttaaaattaaaggaatgaaattcaaaatttaattgtagccagtctacatggtgaaaccctgtctctactaaaaatacaaaaattagcagggtgtgatagcacacacctgtaatcccagctactcgggaggctgaggcaagaggattacttgaacctgggagttggcggttgcagtgagccgagattgcaccattgcattccagcctgggccacagagtgagaccctgtctcaaattaattaattaattaaaataaaataaaataaaaatctcttacctgtgcctttggatccccaagtcaacatcatcctcagattgtctgctttttttcaacacttcccaaatatggccagtaattagttatttaaggtaaaaaccctgagaaataaaaataaaaagtgcttcttctatatcacattttgcatagtattattgtctgacattttaaagaaatttaattttttaccattaaaattttacataaatatatttcccattatcagcccaaagcaaacatactatttttttatacttttttttttttttttttttttgagatgagtcttgctgtgttacccaggctggagtgcagtggcacagtctcggctcactgcaacctctgcttcccatgttcaagtgattctcttgtctcagcctccagagtagctgggactataggtgtgtgccaccacacctggctaatttttgtatttttagtagagacagggtttcatcatattgacccggctggtctcgaactcctgacctcaggtgatccacctgctgcggcctcccaaagtgcggggattacaggcgtgagccaccacgcccggcctgcatactatttaaagtctttacaactttggtccctgggcaatagcttcagccaaggtaggacttagaaaggctaataattaataatcctggagatgaaaccatcttgacaactgttcccttctaaaacaagaacgaggctgggtgcagtggctcatgcctgtaatcccagcactttggaaggccaaggcaggtggatcacttgaggtcggagttcaagaccagcctggccaacacggtgaaacccggtctctactaaaaatacaaagaaattagctgggcatggaggtgcacacctgtaatgccagctactaggaagtttgaggcaggagaattgcttaaatctgggaggtggaggttgcagtgagccgacatcatgccactgtattccagcctggatgacagagtgagactccatctcaaaaaaatttaaaaataaataaataaaacataaataaaatattttctgaaatcttcataagtaattttatgccagtgacagccatcatactacatttttaacatttttgggattcagcgtttctgaattttcatgctgacttcattggattcactatagtttgtttgttttttgagacaggcgctcactctgttgctcaggtttaagtgcactggcacaatcacagctcactgcagcctcgacctcttcggcttatgcaatcctgcctcagcctcctgtgtagctgggtccacaggcacacaccaccatgccgagtcaatctttttatttttgtagagacaatgtcctgtacctacacctacacctatacctacagcctatgcccaggctggtttcaaattcctgggctccagtgagcctcccaccttggcctcccaaagtgctgggattacaggcgtgagccaccacatccagccacactgctagttttataagacaattttcaactgaattcttcctctttttaaagaaagaaaaaaaaaaagtctcactctgtcgctcaggctggagtgccgtggcacaatctcggctcactgccacctctacctcccaggctcaagcagttctcctgcctcagcctcctgagtagctgggactgcaggtgtgcgccaccacatctggcttatttttgttatttttagtagagatggggtttcgccatgttggtcaggctggtctcgaactcctgacctcaagtgatccacccacctcagcctaccaaagtgctgggattataggcatgagccacagcatccggccctgaattcttaacctatgctatatatcacggacgttaaatcctattagaaatgcatattcgagctattagtagaattgttamactgagatatgtaatacagaaaacactagtyctttgttttarattttaaatcttttttaaattggcagaaaggatttgatgtattcaatgcactggatttgatggaaaataagacattcttggaaaaactcaagtttggtataggagatggcaatttgcagtattacctgtacaattggaggtgtccaggtacagattctgaaaaggtaagtgaaatggatatagcccttgtaaactcaacaaatgtacctagacaatttcatacttgcttcacttagacttaagacagctttattttatttttgttcattttatttatttatttatttatttttttgagatgaagtctcgctctgtcccccaggctggagtgcaatggcatgatctcagctcactgcaacctccgcctcccaggttcaagtgattctcctgcctcagcctcccgagtagctgggattacatccaccaccatgcctggctaattttttcatttttagtagagatggggtttgaccatgttggccaggctggtctcaaactcctgacctcaggtgatccgcctgccttggcctcccaaagtgccgggattacaggtgtgagctgagccttaagacagcttttagaaagacagatctattgtactacattgcaatctaatttttcttactattccatttcttccctcccttcaggttggactagtactacaatagatggatatttttatttctagaactctgacatcatcatttgttaatatttaatgatttctggaactgccattccaaagaagaataaaagcacaactcaagtgaaattgaagtagtcgataatcagaaaagatgacaaaagtccacatgtgacatttgtacgtttctagctagaatgttaaacttcatcctttttttactgttgacctatttgtgggagggatgaaaggctacaaagagcacattcttgtaattttcaaatttttgcctgtctcttgaagaggtattttttcacccttagaaaagggactgtttttctatggactaagtagaagttacagagtcatgtaagaaaatctttgctattgtgtggagagaaattgctgcatttctgtttcttaagtgatggtacatttgtccatgtaacagaacaaaagatccatttggaaattttttttactggtatcaccttacatggtatcactgggaacatttatggaatcaacacttctgtagctcagtgacaggtggtggttgtttaagtgcagagcaatattaaaatgtactggtgactagtacatgtatttctccataagcagagttgccgaatcaataaacatgcaagtttgtactttgatctttaccaggtcagtggattgcttcaaaagcagagttttgtgcaagcactcactgtgctctctgaaagagcctgaggccgggcgtggtggctcacgcctgtaatcccagcactttgggaggccaaggtgggcagatcatgaggtcaggagatcgagaccattctggccaacatagtgaaaccccatctctactaaaaatacaaaaattagccgggcgtggtggcgtgtgcctgtagtcccagctgcttgggaggctgaggcaggagaatcgcttgarcctgrgaggtgaggttgcagtgagccgagatcgagccactgcactccagcctgggtgacagagcgtgagactccgtctcaaaaaaaaaaaaaaagaaagagcctgtacccgcgactaactagacttttctgctgttgtgcaaagttcagtttcttctcagcaacatcaaggatatatgaagaaaaggaaataaaaaactgtaaagtcaaaagagatgcctggtggaacttattcgtgctatcagggcattgatagtttgaatgtttttattacttatgcaaaattgcacatactcctctatrctgattttatcatgaaaactgtcatgtgtcatgctaatggaaaatgtcttatttgtaaataagtattcataattttgttactgatggtgtttttaatctagaatttgaaaaactttcatggcttacagatgtgtgtttatattgccaataatctgcgggaaaaataagatgctaaccgaggccacgtagcctggcctcaactcagataccacaaagtagatgccttggctgggtgtggtggctcacgcctgtaatcccagcactttgggaggccaaggcgggcgaaacatttgaggtcaggggttcgagaccagcctggccaacatggtgaaaccccatctctactaaaaattcaaaaagaactagctgggtgtggtggcgggtgcctgtaatcccagctgctaggaggctgaggcaggagaatcacttgaacccaggaggcggaagttgcagtgagccaagatcgtgccactgcactccagcctgggtgacagtgcaagactccgtctcaaaaaacaaaagtagatacttttccctgcttttactgggccagtgcctaggaagttcagtgcagaagttaattgttttagacatgatggcatttccttcaagttatgagtccagtgaaaccaatcatatcttatcccaggcaggggccaccaaactatggcctgtgggctaaatccagcccattgcttatttttgtgtagcccacaggctaagaatgtttttattttctggaatggttgaggagaaaaagccaaaaaatgacatcattttgtgacatgtgcaaattacacaaaattcaaattccrgtgtccctcaataaggttttattggaacatagccatacttttttttttttttttttaggacagggtctcactctattgtccaggctagaatacagtggcacagtcaacagctcactgcagccccaaactcctgggttaaaatgatcctcctgcttcagcgtctttttgaagaaaaagaactagctgggcgtgcataccaccacgcctggctaagtttttcattttttgtagagacaaggtcttgctatgtttcccgtgctggtctttaactcctggcctcaagtgatccttctgccttggcctcccaaagtactgggattatagacatgagccaccactcttggccacagccactttcatttacatattgcctatggctgcttcacactacaaagctgagttgagttgttgtgacagattgtgtggcctgcaaagcctaagatattcactctctggtcttttacagaaagtttgttgaccttggtcactacgaaggagttggaactctcctttctataggttgccgtgattctaaagaccaacccacagctgtgacatccctgagactaccaccagagggcgactgggccccacagtagtacataatataggacctytcttggagataatggaagacttggaatttcagatggttccaccctaattgcattagcgttctttcttaacaggagaaaggcttcaagaaacaaaacagtcctcattcactggaacagggtttgagataccagcattaagtaaatgagattttgacttaacctggagtcaaggctctaatttaggactttacttcccactcattttcatgccacaaagtctatacaaagtaggttttcaaataattgcagaatcagccaggcacrgtggctcacacctgtaatccctgcactttgggaggccaaggtgagcagatcacttgaggtcaggagtcttgagaccagcctggccaacatggtgaagccctatctctactaaaattacaaaaactagccggacaygggggtgtgcacctgtaatcccagctattcaggaggctgaggcaggagaatcgcttgaacccaggaggcggggttgcagtgagccgggatcacaccactgcactccagcctgggcaacagagtgagactctatctcgaaagtaaaataaataactgcagcattgccagttggaaactttgtcatgagcttacctcacggtgacagttacactgctcctttaaagagtcatttacrtaatttgttatcaaattattaaccacttttaaatagaataataactacatttgcctccataattgaagcagattactaattaacattttcgagaattaaactgcttgcttatgaagtagctattaaaactaaattgaaatgcaatggatagtttcttgtagatttaaaactgcattgtactgtactttgtctataatgaaaatgttctattcaataaggtatctttttttcttctttttggccaagatggcactaagtaaaatttaaatcgagagatggcataatccatgagtcagccagactttcagctggaaaaatctttagtaaataccttccttctaaattacagaaagtaacttttccatacacactgtaaacagcagacactctaacagagcatcggttatgctccatctcctaacctgaaggactcttgtcacacacccacctctgagaacccaagctcctcagtttttttaatcttttggccacatttcatccaattaccatcataccttttatacgttagatttccaaggaggtaagtgaatcacgtaatgggggtgaactgtacccagtcaaaataaccttatctgactttttctatatttttgatattttttctctaaatattaagtctttctcccaagctcatgtctattccttcctaaaagtcaaattgacatgaagtgaaaaatgatgtgttgcttctgaagacaatggattgcttggcatttgggatctttcctttaaaactgataatgcttccccaattcagttccatctacctgactgactagaacatttactgtggtacattttccaggtttgataggaaaatgctaagcgttgtatgacacagatattcttgctcacaggcactctaccagcctttgaaaaagtcaatttaggctggacgcggctgctcacgtctgtcatctcagcactttgggaggacaaggcaggtggatcacgaggtcagttcgagaccagcctgaccaacatggtgaaaccccatctctactaaaaatacaaaaaaatgagctgggtgtggtggtgggcacctgcaatcccagctactcaggcggctgagacaggagaatcgttgaatctgggtggtggagggtgcagtgagccgagattgcgccgctgcactcctgccttggcgacagaacgaaactctgtctcaaaaaaaaaaaaaaaaaggccaggcacggtggctcgcagctgtaatcctagcactttgggaggctgacgtgggcaaatcacgaggtcaagagacggaaaccatcctggccaacatggtaaaaccccgtgtctactaaaaatacaaaacttagctaggcatggtggtgcgcacctgtagtcccagatacttgggaagctgaggcaggagaattgcttgaacccgtgaggaggaggttgcagtgagctgagaccgcaccattgcactccagcctggacaacaagagtgaaactgtctcaaaaaaaaaaaaaagaaaaagaaaaagtcaatttacacacgcatgaacactagtttcaataaatgtctgtttggctattcctaattttgaatatttcctgcacttagtatatctgtgccatagttacaaagagtcttacacatttgaatattaccaaacaggaccctatgaatctatgtaagtataactcattttattagtttcaaggcttctttacaaggtgtcctttcacaaactgtatgacatgacaagtttatgcaagattactttggagtagcttttttacttttgggtggtttccttatcttattagggtttggaatcagtttctttattttaaggggttgtartgttacagaagcctgccsaccgtcagcaagctttctcttaggttttgacagatcttcaaatgaagtgtccaaaagctctctgtcttggctttccagaggttcagtctctaaattttccccagaatcttcarttctgtcttgaagccatggtacacttaaackggggactctggggatgatggctcttacttcgtccacaaagtcagtggtgttctttttgaacsccaaggctagaacacattttaagccaatgacgggggcgattctctcactgagccgggggacctgacaggcagggacacttctgcttaggcttaactgaatcaagtgtgaggtgatcatggcaggcttgactgatttacacaccagaactaacagcagttccctcctttccagggctctggtaacttcgttaacgccaatgrcaagctgcttcctgacgtgtgcaggcgtccaccctgacacttgctgcttagcatctgttttcttctccttcagattmtcactaayatcaacagcaatgctgcatttctctctgctttcttttttcagaaaaggtgttttgttctttttcttyttatcttcaatcttctgaagtccaatagctttaagcctgtcctcaagcgtctgtaggatgaagtgcatatcctcgctctccagagcgctccagcggatgatgtatgggttgttcaacgacgtcttcacaaccagaggtctygtcttacggagagatccccgccccggtgcttgaggagctgcagccattttgaaaatccttccaagaagcaaaatgacaacagaaaaaattcatgttagcgacaactgcatgacttaagaatatcttgactgtactctctgattcttatttatttatgtatttattttttgagacagaatttcactcttgttgcccaggctggagtgcagtggcacaatctcagctcactgcaacctccacctcctgggttcaagcgattctcctgcctcagcctcccgagtagctgggattacaggcgcccgccaccaagcccagctaatgtttctatttttttttagtagagacagggtttcaccatgttgcccaggctggtctcaaactcctgacctcaggtgatccacccacctcggcctcccaaagtgctgggattacaggcatgagccactgcgcccggcctgtactctgattctggataagctagagcaagcctgattatataagtccaattaggtgagcatacgcttgtcttccttttaaagattaagtaattttatttttccccatttttcttacccgattttgaatgctctacgaaggctctttaaaatactcaggactatgggtgagtagtgtttaattttccccatttttttatatgactttgtctttattcctatacaagcaatatgtgaaagttttaattattgcaatcatagtacaattccatttgtctatttcatttattaaaaatattctgtttctacttgttcataattaaccttctagtgactgtatggtattaatcttctaacttgttactgttttccaaaatgctatctagttgggcttccatgcattcactcaacaaatattctaggcctggcacactggctcatgccttcagtctcagaatttcgggaggctgtggtggacagatcacttcagcccatgagttcgagaccactctgagcaaatggagaaaccctctacaaaaaatacataaattagctaagtgtgaggcgtacctgtagtcccagctacttgggaggctgaggtgggaagatcacttgagcccaggaggtcaaggatgcagtgagcgtgattgtgccaccacactccagcccagtaacacatctgaccctgtctgcaaaaaaaaaaaaaaaaaaatgatctgagcacctccagtatgcaagtggtgttctaggtcctggggctcacagtaagcaagacccgatgtccacccacgtagagctcccaatctgcaaatactctggtggcctctgccattcacaaccaatcaggtgtgatattttaaagaactgaacagtcatctcatgattaaaacttcaaataacactgtcacgtccacttttgtaagtctccccacctcccagggccctaaatttcttgaatatccttcctacagcatttgatacatatgcaggcatacactcccttttttttgttttttgagacggagttttgctcttgttgcctaggctggagtgcaatggcatgatctcagcttattgcaacctctgcctcccagattcaagcgattctcctgccacagcctccggagtagctgggattataggtgcccaacaccacgcctggctaatttttgtatttttagtagagatggggttcaccatgttggccaggcgggtctcgaactcctgacctcaggtgattcacccacctcagcttcccagagtgctgggattacaggaacgagccaccactcccggccagtcctcctttttagggggaccccgagctgacttctctggctggcaattccatgaagactagggaaatgtaatgaaatttaaagatactaatccattgaggaaaaatgagtagaaggatgcttaatggggaaaatgttataaactattggtccagagggcatatccttttatccttcccagaggcaactacacactcccttctcttccctcagttttcttcccttccttcctggggctcagctagaatcacagggacccacctggcaaaactaaaggaagttatatcctttgcatttatactaccacttactaggctggcagctgatgttgaaggcaagtgtgtctgtgcagtgtatcgctgtataaagcactctctccatgtattatttgcttcttacagcattcctatagaatcccccaatgtgtgcattaggaaactgactcactgcctaaagtcacaactagttttccaaatccaagttttctgttctttcaatccttgctacacctcaaaaataacctgtggcttcttaaaacatgcagatgcttggtcctcaacccagatctactgaattggaatcttcaataataaggcctgggcatctgtgcttataaaaagctgccccaggccgggtgcagtggctcacgccagtaaccaaagcacattgggagcccaaggcgggcggatcataaggtcaggagttcgagaccagcctggccaatatggcgaaatcccgtctctactaaaaaatacaaaaaaattagccaggcatggtggtgcctgcctgtaatcccagctacttggaggctgaggcaggagaatctcttgaatccaggagacggaggttgtagtgagtcaagatcgcgccactgcattctagcctgggcgacagcaagactccatatcaaaaaaaaaaaaaaagttgccctcgtgaatctgattcagagccggaatcaggaaccactggtgtaggacagggtgtttccacactggacagccccgagaaagggccccctgagcgctattggtctctgatattcttcccagacactttcccacagaaaagccaaattcagctccttagggtgagagatcacaccctggtcatctcggtacagcaatcctggagacttctggggcctaagctgcttccttcacggtggccacactgtgtcccctgaccccattatctctatgctcccctagagctcaggaaatcaggaagaaaagtggctcatccagatgcaatgcagtgactgtgaggggctggcatcaggttcaaagtggtcaggaagagggaaataagtgacagggggtgaaacaaataggatggggcagagctcttgccaactgcaagtcagatgatgtctccacatccaaacaccacagaataaatacttaaaatcatgctccagagggatcacaaaacaggctataaacttgtcccacctgcagaatctgctggggcgataaagagagccaagtagtctggataagcataatctcacgcaatataatccagaaacaaagtactgactgataagattttatagctttagagaaagagagaaaaataggctttgctgagggccctttagagctgtctcaagaggcctctgctgcctgtagatcaagggcaaactctttttactagacagtcttgccctgtcacctggcagtagtgcagtcgttcgatcatggctcactgcagccttgaacttctgggttcaagcaatcctcccacctcagcctcatgctgaatagctgggattataggcgcataccaccaagcccagaaaatttttttaatttttaaattttctgtataggctgggcacggtggctcacacctgtaatcccagcactttgggaggacaagctggacagatcacttgaggtcaggagttcgagaccagcctggcaaatatggtgaaacccagtctctactaaaaatacaaaaattagccaggagtgctggtgcacacctgtaatcccagctacttaggtgggtggctgaggtaggggaattgcttgaacccagaaggcggaggctgcaatgagccgtaattgcaccactgtgctccagcctgggcaatggagtaagactccgtcttaaaaaaaaaaaaaaaagaaattctatagagacaaggtcttgctttgttgcctgggctggtcttcaactcctaggctcaggcaatcccgtagcctcggcctccccaaaagtactgggattgagggcatgagctaccatgccccgcctaaactctaatgtgacataaaaggccctccacactccagctcaatctcccacttaggccctctttctccttaggccccaccaagcacaagtcctcaacaccgaacaacatactatttaatgaggccagcattttcccacctgcaagtctttatacacattagtccctctgcctggaataccactcccaccctcagccgcaggccccttcctttcttcaacaaatatttatcgattatccacgatgtgccaggccataaagattaagtattttttctcacagacctcatgagcttagagtccacgaggaaaaaatattagcaagtaattatacaataaagcctgatgcacatgaaggtcagggaacagtatgcttagggaacatccagcagaggcctagcttagttgaggggggtgggaaaaggcagtcctcacagaggaacttttttttttttttttttttttgagacggagtctcattctgtcgccaggctgaagtgcagtggcacaatctcggctcactgcatcctccgcctccagggttcaagcgattctcctgcctcagactcccgagtagctgggactacaggcacgggccatcacgcccggctaattcttgtatttttagtagagacggggtttcaccatgttggccaggatggtctcgatctcctgactttgtgatccgcccgcctcggcctcccaaagtgctgggactacaggcgtgagccaccgcgccgggccggacctcttaacctacatctaaacaatgcctaccaaaggaagtatggagtaaagaaaggtatctcagtattaaaagaaataagttggctggcgaggtggctcacgcctgtaatcccagcactttgggaagcccaggcgggcggatcacttgaggtcagtagatcgagactagcctgaccaacgtggtgacccgtctctactaaaaatacgaaaattagccgggcgtggtggcaggcgcctgtagtcccagctactcgggaggctgaggcaggagaatcgcttgaacccggcaggcggaggttgcagtgagccggaatcgcgccactgcactccagcctgggcgactgctatgtctcaaaaaaaaaaaaaaaaaaaaaaacacgttcaaataagttcaatgtggctggggcagagatgctagagaaagcggtgagaaactaggaaaggtgggtaaggaccagataatgaagacctttgcaagcgttccagtgtgaagcaactttaacatctaaagcagaggtgtcgtgattagaaagacgttatagatctttgtggatctgggcaaaggaagagtccccgagcagcaaagacgctcctggagtcgtccaggttagaaatgacggtggcctgcactagagacgccgcagaaaggactggagaaaaatacatgttagtcggaaaagaaggtagaatctcccgacacagtagtgaccagctggaagtaaagttgagaacggtattggtggtgactcccggtttctggatcccgccggtagccgaggggcgacggccgacccaaagctcacctccccactgcacgccgcccctggatcgagtaccttggtgctttactatttagcacacggaagtgttgttctgttgtccgtgtctccttggagaccgtggagaacagaagggccggcgggggttttcgctttgtactcctggtgcccagccggcgctgcaatccagcagaggagccggactagaaacgcggaagctctgggtgcacgcgcccggcccgggactgggcggcccaaccgggagggcggcgggtcctgcggccacgcaacaggcgttggggaagcagcagagaccctgcgtgcgcgcgggcttcggcctccagattccgcagagtcccgggcccgatccccccggggctggcctcctgccctacgtgggccccgcgcgcccacctggaactcacgatggcgaatccgtggtcacctgaaggcaacagcaccggcgcccagtgcgcctgcgccgcgcgtgcgcagagccctcgcctcccggcctcgcctcgcagacgcgacgggccggggaggaagcgctcggagcagtgcaggtttcgttatcctgtgttaggtcactccggagaggggaaagcggcccacagcgtcgcgcgacccggaaacgacacaacgaggcccaatcttttagactcgagtttaggccccggggtggagtctccggaccgggtccccccac

SEQ ID NO: 95279 - DNA, 209444 bp, Homo sapiens
gctttgcctgtcccttcctcctctgcttctccttttaacaccaactgtatttaggtgaagactacccccatctcctttccatctgtcttctttatacctgtgaatgtcagagaacagctggggtaggtgtggcagaacctgggaatagagagggcaggaagaagagtgcatgttctggacccagattcaccagccctgttacagtgtttggaaatttattttgctattgatgccagatatggagccctgaactccactgagtggatggtataactgcaagacaaatatgcacttcaggtgggtggcattggaggttttcctttctctgcccacaggaaaaatgcaagtgtagtgtaatgaattaaaactctgggtacaggactgtcttgctttgatcacttcaaatgtaagaggggatgggctgtttaaaacccagatattcaaagagtattcccaagatagcaaaggtgtgttgtttttagcaggtgtatttcagctagttaattaaaataagactagtttagccacttccaaagggaacagactgttttcatttagaatgtgtttttcctgtttataaaaaaaaaaaaaaaaaaaaaaggacccaggtcctgaaagtgaaaggtctctgttcatacctatttcttgggcagcaccctgcctgctcctgagctcctttgcttcctagagctagaagagagttggtggcatcacagctgtcagggattcacagttgagcttttgggcacctgctgagtgggctttatcaggttggtggcactgggccatctgggggagtgaatgacctcagagcttcttcccaggaatttggatttattttagaagagaaagctgctttgcctgtcccttctcctcctctgcttctccttttaacaccaactgtatttagatgaagactgccccccaccaccgtccccgttccatctgtctttcttacaccagtaatcctgtaaatgtgtatttttctccctttcatgtgttgattcaacccttgaggttggtgggacattgcattagactcacggcttcttaatagtactggactttggtttctgttttgtgttccatacggagaggtctcttcctttctgagtttccgcatgcagctggtagactcagcttggtttggcggaggccatgtagtattaggcaggaattggggtgctggtttgattctaactggaaaacataatattttctggcctcagggtcttcctctgtaaattgagggtttgcatttgatattttcctaagcaaaaccagacgttgtcttccagtctgtaaaaaggtattttatacattttaatttatcatatttcctgttaaagttgattgttagaccagggagatgtggttctgtggtgagcacaaaaccaggagtttggtaagaggttgtgcagtcaatgcaaggttagcacccagttgatttctgcactgtgttttggttcacggtagaagcagtccatattcatccaattatgaatgggagtggctatcattttaaagaataacttaccaagcactctaagttgcttttaatgtaaattgagatggaggctgaaaagagaagtagtagaaattgtttcaaagttgaattattaacatctaaagacagttgtcacttaaaatatgggagtcaggcaagcagccttggaacttcaagatatgtgaccaactctcatctggcatttaattagggtagtgcttttttgtcatacaatttcatgtgaatagatacctgggcctgaattaaaaaaaaaaaaaaaaaaaaaaaaaacgtaaactagaccactactgagcattagttttgtgaccaataaggtggaaatttgaagttcaaacttcagtgtatggaggtagccagggcagttttgctgagtctctgcgatataaattgatacgtatattgattgtctctagtatcttaggatttggcatgtcaaactttttttgaaaaatgtttaaaaacatcttaaacaaaaccaaaagtcaaatgaaacatttgtggaacctctggaacatctctgtgaatgaatctttgatgttctttggagcacagtttgagaaccaataactcagttgctcacccctactcctctggctctaacagtgttctgtgtttctagaactttctccatgttatacatgtggaaactgagatggacacacttaggatcacacaatgccaatggtagaacaagctgcagatcagagattttcaggtttttgatgcaaggttctctcagttcctccttgtcaccctttcaggtcttattttctgtgatcttctcagcataacagtgacaatacaagtggcctccaagaaaggttcccrggtattttcccctccatcccttgtcttagacatattttgtttctgtaatctcactgccctgcccccctagaattttcttctggagtgtttttttgcagttttcttctctgttaatacctgactaccatcacatccactttagtttaaccctgcctcttcaagggttttactactaagggtaaaatcttgtaaaaggtaaggtgcaaatgtattgtcagaatgcccaggttctgtggctcataccagaaggaggtcttggaggtctttgctaatttgcatttcttcacctcatttccaccatcctgtccttccatctaacaaatacttaatgaccaccctctgtgtgcaaggcatggccattgccggcatttcttgtctttgggggcctcacagaccccataggcgagatgaaacgggattgtcctatagagcaaggaaggagcacgaactgctatgagttacgagtactctatggaaggggagctttcctcagtctagggagcccctggaggctttatgcaggaaggaggtggggtgagattggaggctggagatgtgggtgggattttccaaggaaattgggtggacacagtgacttaggatttcttgaaggttactgtacaggatgaagctaaatgtaggctccttagccaccatttaatgatgactatgaagtagctcaggtggtacacagtgaggacagagaggtctgggaaccactaagttagagcagcgctgtcctatgtgaatgtggcgcatgggatggtattgtcctgcagggctatttgaagagaccaaatctctgcttggggctggcattgcttctgaagggatgggcatttctgcctttgtttatcctctgaggaggcaggcccttgtgtcagaaatagggcctccagggatgttggatggccacctggaggaactgcttcattggtctcgttctcactccattggaactgggctgctgctcagtgttctcaggtgggttgagaaattggcatttgccagacaaggtgggccaggagccttctgaagccaggctcctggccaggagcctgtaaggttgatccagaggttataagagcggtcatatgtggtgaactggaagtagatcactgtggtttccttctgttgctaggcccatggccagcccttagttcctgccctggtcttggctgtgctaggcccatgacactcatctgcctgctctaagccaaactcctccttttccccatagctttagaggtgggcttgctttcttttttcttttttttttttaacagttttttttttgagatatgatacacatatcataccatcctcctatttaaacgtatacaactccatggcttttggtatgtccacagaattatgctcctatcaccacaattttagaacctttttgttaccccctagaaaaaccctatacaccttagctatcacctctcatttcctccattctccataccccagccctaagcaagtactaatgtattttctgcctttacagatttgcctattctagacatttaatatcaatggaatcatgcaatatgtgtttttttgttactttttttgcttagtataatgttcttaagagtcatctatgtgtagcataatcagttcattcctttttatagccagataatatttaattgcatggatatggcagttttgtttccatttcctcagttgatgcacattaggctggttttacttttgtttattatggataatgctgctgagtatggatactgctgctgagtacttctgtgtacaagtttttgtgtagacacgtattttcatttctcttgggagagttcctagaagcagaattgtttggatcatacagtaactccatgtttaactatttgaggtactgccagattatttcccacactggctgcgccatttgatattcccaccagtggtagatgagggttccaatttctccacatcttcaccaacacttgttcttatctgtatgtccttatgagtgtgaagttagtatctcattgtggttttgatttgcatttcctctaatgactaatgatgttgagcatcttttcatgtgctttttttttctttctttcaggagaattgacacatttctttgccagagatctctaaccatctttataaaggttgaagatgattttgttgtgttgaggcgtcagtgggaaggaacaaggtgattgctactcttttaggaagtaggaggatagaggggatgcatattgaggtggctaattctgcaaacagacttggtgcaaacttttttctggaagtgaattgatgaagtcacggccatgagctgacattactctggttggcaacaaggtcttctgagatccactgtatagtcccactgtgcccattggatgacttagctagaggacacagccgttagaaggtctggaggtaggcatcttcttagctccagcaacaacttcttgatcactgttagtctagggcttcctcattaattgtctggtcattcctgatgatcttcattatcattttgtggcaccaagactatgaggatggctgttcattttcctcctcattgtccacctgttactgtgagagataggggtgtctcctgaataatgcttttgaaaagtcttaagttctgtcatcttaataggaattgtagagatgcattctgtgattctctgtgtgtgctgtgtgtatactgatattgtttctattatttcaagctctaagtaccactggagaagagaagtttcctggcacttctatagtcacttaaaatctgggccctcactaatcagaactgtactctgaactccgcatagctagggattttcacttcaaatttgcatgtctctgaactgggataattttacctaggctgagattttttggccatctctttgcgcctctgatacaccatctggatgtgtctgaccttctccaaggcaagggcagagaagaagccttctaccttctaaggaagctattgttcagttcctagcccttgatctttcctttgttttaactccatagcttgagcagcctattcagtagggttaattgaggaagtagagtggggtttcctgtctgaaagtggacagctaattcctaccagtgattcgggctctttactaaaatagtgaaagaaaaatcaccttttttgatgtagcacctcattggcttgctctaggaaaattccttcagccctggttcaaaattaagtaatgagtaatgagtatgggttatcaaaaaaaaaaaaagccaattcccttggagctaggtgcagcacctagttcgtaatgtggctgtcagagtgtaattctgatggggtggaaactccatcttgttcactgttcagtcaccagggcctgatggccgctcatgctcaatatagacttggcgcggagcggagtggaggaaggaaagagggcaggygctagttggctggcctgcagttagaagggctgaataaagtgctgtagtgccctaggcgacatattcatttagcagatactttattgtgccactgtggtcagtgcctttctctgagaaggtgtgtgtgtggggaggggctccctaaaggatgtcatagagtcccacatagaaactttgaacaatccaaggtagacaggtgtttttaactcataatactcctttattccctgttttaaaaatttttttaaatttgatacaataattatacataataatggagtaycatgtgagattcaatccacatatacattgtgaaatgatcaaattaggatagttagcatgcacatcacccccaaataattattacttttgtggtgagaacacttaaaattgtctcttttagaaatatacgttattattaaccatagtcacctygctgtgcaatagaacaccagaacttattcctcctaaatgtaactttttacccattgaccactccctcctcayccccctctctcctccccacccctggtaaccactgttctgttatctcctatgatagcaactttttagcttctgcatgtgagattgtacggtagttgcctttctgtgcctggattatttcatttagcataatgtccttcgggtatatccctgttgctgcaaaagacaggatttctctctctttttctggttgaatagtattccattgtcagagaagtgttgtaagactaggaaaggaacactgcaggctggagccctggggaaagtggtctgaggcaggtggtgggactagagctggggtctggcaaacaggctgggtttgattgtcagcataatagagagcactcatgtgccagctgggtgggaggagcagccgagtgaagaaggggaagcctctcaggaagcatgtgcagggtttatggtaatgagcagaccagcaggtacgtagtgggagaggggtgtgatggggcagaggaacttacgttatgatagtacaagacagaggttgagcctcattttaataggcattgtggtgggtgttgaatagtgatggaatgtatgggtctggaatcaggctgcctggtcaagggctctgaaacatgagtgtgcatcagaatcacctcgaggcttgttaaaggataggctgtggaccacatctcctcagttgctgattcagtgggtgtgggtggggcctgagaattcacatttcycactggtgatgctgctgttactgagtttgggaccacatttggagaaccactggtctagaattgagaggttggcaaaccttctctgttaagaggtagatagtaaatattttaggccttctgggctacaaagagtatctgttacatattttttattgcttttcatgacccattaagcatatatatatcattctctgccatatacaaacaggctgttgggggagtgaggatgatgtagggaaggtggggcatggtttaataacccctgggccatgcctagatgatcagtcctctgccacatagctggctgacctttgccaagttaatcaccttttacctttattttctcatgtttctaataaaacagagacgataatattcatacttcttaccatatagaacttctgaggattcagtgagcaaagccacaaaagatggtatgtcacaatatctgggatatagctagaatttataatttatttttactctgttgataggcaatgggaaaacagtaagaggcagaccaacagtgatccagggctctgaaagctaattgcttcaagatcctgctaccattttcttttgggccgcttgcaaagaagaatcctttgactgaagcatgtatgtacactctgaagtacagcctgggttagtctcttataagggatcggatcattgctcagcctctcccttgagtggcacttagaaaatggcgctattcrtaagctgactggtattgggcccaggactctggctgaaggggtgggcatgctggtaaccatttgcaacctatgctcaggtcctacttgttgggaagccctgattgagaagagtggcctggtctgtgctggcattagataggatctggctgcattaatattgaaactactctgccttttaatgtctcattttgcctcatggtgggagtgaaagtgagaaccacagaaaatctgcctgccaggtgttccacatttcttgtgctacagcatgcaagtgagcagtgaggtgtaccttttcctcatgtagctgggaaagcaatacccctgcttgtacctctggcatatcttctctgtgctggtgcacctagagaggttgcctggtggccctgagagagccatctcatcactaaacactgatggtgaaagctggccatgctcaaataagatgtagcaatctacctcttctttgtctagttacccccaagggggcatccactttcttgctcacctcaccagttgcatgttctagtccttgccagaagcacataataatgactttgtaagcttaagttacaggcacacaaaagggcctgatggtgatatgactccaccctccccgtttttgctgacattccgccaaatatccttctgtctcctccccaccttgcaaaacaaacttcctgttttgaatttggtccaggctggaacagccccacyacacctgttaacacacgcagacgcacacttcccccttcataattgcttagcttcttgttgcctagccagatttcccctcagcttacagttcctgaatcataagatattgaaccagcaaatttaagagttgacattttacttagaggtattcaagtgaaaacatggcttctggtttattttgctgtattgtgccatgaccacttggctaattcttctcctccttcacagcagaatggaagtgaggaaaggcaaccagctgacacaggagccagagtgagaccagcagactctcacactcaacctacaccatgaatttgtgtctatcttctacgcgttaagagccaaggacaggtgaagttgccagagagcaatggctctcttcactccgtggaagttgtcctctcagaagctgggctttttcctggtgacttttggcttcatttggggtatgatgcttctgcactttaccatccagcagcgaactcagcctgaaagcagctccatgctgcgcgagcagatcctggacctcagcaaaaggtacatcaaggcactggcagaagaaaacaggaatgtggtggatgggccatacgctggagtcatgacagcttatggtaagcactgtttctgggacctctccattaaagtgtgccttggccttgaaatggccctagaagctcccagatatggtcttgtcatggactgaatgtcctttgccactgccttcataagcagtgaattgcacacagagaggcatctttaggaaattaaagcaatgccattttgggggttctgagctggtgtatgcagacacactttcccctggagtcagtgggttagtatagttagggctctattggttgtgtttgcagctagctccttctccctgaacacatttcaggaaccatgtgatctcatgtgggagtgagttcagggaatgctgaaaaatattctcatctttccctaaacaaaacttaattaaggctggtgggggtgargtgaagaggatggggaggaatgttctatggaagccartaaacttagagccaattgtgttcctccctccagccaataaatatgacactggcacttgcatgctggtgagttttaacctttggcttcttgaggttatgttgctcttcttcttgcccttgtctctaactgccctcactttgaaaggaatctttgtgtacttgttgctttttctttaaagaatttttttcagaattctttttgaaatcagmaagagtaaaaaaatacacatatgggatgtaacttatttttcttttatgtttaatatagaaaaagttggaagctgtagacaagcaaaaaaagaaaaaaattacacataagtctactactccaggcaataaccacaattaacatttcagtgtgtatttttctgatactttgcatacacacacaaatatatatatacatatatatacatatatacatatatatacacatatatacacatatatatatacacacacatatatatatacatacacatacacacacaaatacttggaaaaaaattgcaaatggaatttagatcatgctgtgttttgcagagcagacttggtctgtagaagatgacctgttgttgagtgacaagagtctgatcattgaattgaggtttcagtggtctcactgaagtggtctccctgatagtatagatgagatgcaagaatggggttaggtgaggtggagaaagtggagttgtgttttgtgacccactcaaggaaggtgccctgaagtatgccgatttcaaatcgtgattcccaaaaatgtgcagcaacagttcagttcagtgcaggttgagttcagacacaggaaatcatactcagttatacatgtgcttctttctttccaaaaggggaaaaaaacttgtttttaaaaaagtatgtaaaattttatacacacgtatgtgtatgtgtgtgtgtgtatgtgtatatattagaagrtgcttacttctgaggaacattttagaaattcttttctagttcttactatgtaaataatcacactctgcatttaatctgttaaaagtgtctgtaggcattggcttttaatatatctaaaaaaatggtaccttttttgaactgatggatttaaaaaatgagattccactgtgggagcttacactgaaaagtaactaggtagtttttcctagagttgcattttaaaattgctcattgactcacatttgtgtaacatttccagagtagtttagataaaccaacagaaaataaagctgattgtcaccattagtgttaccaatgtatatgacacagcaggtaacacaggtgcagttttaaagtttctggttgtatgcatttcatgttacagctttgaagggaaagagttacagctcagtggtaattttctcttgtttctctcagtctgtcaaaccttttccatgggcaagaagaagccccacaaatagcaaatttataggctttaaatttctscagttgttttggctgtttgtatttcttgtgtattgatraaaatctcayagggaaggcttccccacattttaaaggacaataatttggtcttagcttttcagcctcacagaaatattattttttaagttacaaaaaaatcccagaataggctgttagaatttcagccaccttatatgcctgtaatcataagactttgcatctcaaagaaactatagaaattatttattccwacttactttcgtagatgaaccttagcaaaataatttgtctttttctcaaaaacaacaaagaaacaatcaaacaggtcacatcagcaactctaactgacactgctagttttctctttcatcgaatcaactttaacgtatcaaagtggttttgggagctgagtttctggaatttttattggacttgtatgtatgtgcttgaggtactggggggttatcacatggtgagatcctactaagacagtgtctcatttggtgctrttgacttttggtctaaataggtcttgattgtggtaggatttcagcagcatctcaggggtctctacccactagatgccagtaacagctccctagttgtgacaatcaaaatgtctttagayatgtgataattatccccttcctgccaccttggagaactgtactaagagtggaagccacaaacgctatctgacatcatctttttaaggatgttatcaagcagataactggttttagtttttttgtttgtttgtttctgagatggagtcttgcrttgttgcccaggctggagtgcagtggtgtgatcttggctcactgcaacacccrcctcctgggttcaagcctcagcctccagagtagctgggattacaggcgcacaccaccacgcctgcctaatttttgtgtttttagtagatacggggtttcaccatgttggccaggctggtctcaaacacctgacctcagatgatctgcccgcctcagcctcccaaagtgctgggattacaggtgtgagccgctgtgcctggcctggttttagttatttcaaacttgaaagcctagtgttccccctggtttccagttctggcaccaacaatttggattgaacaagaggattgtactagggattagttagtatagtccagggccagtcctagaagctggagagccattctgatgatatatgcttcccttggaatctgtcagtatcagtaacattgtgtgacatgcaggcagctctggtagttaatgtcacatgctggtgcagagactgtaggattctcartggtatagctgggctggcagaacagtgatgtggatgcataggccattagtttgcagtctcctttttttttttttttttttttttttgccataaatgcagcctatgtgcagtgcattgcctacacatctgctttgagagtgaagagttgatcctgtatggctaggatttgtgtctggtttaaatgaatccagcaaaaagaagaaaaaaattccttctttatctcatccccatattggtataatcagaggcttttaggataaatgggtatacagtaggtatttgagggattgtagtagctgattttagatgattgctgatttattagaatttctggttagagattccaaggcagcagggctcggtgaactatgacctatgcgccaaattcaggacctttgtctgattgtgtaaatagttttattggaacacctccactcccatttgtttgtaacaaatgcaataacagataaacacggtaattccagtatttatttcataaaacatctgaaacattctgaatccatcaatcagcagtcaccatggttattctaaatactcatctgatcaagttccttattgattcaactatttcccaggactcccatggtctaaggcagagtcagcaaaccatggcctacgggccaagtcttccttggtacctgtgtttgtaaagaaagccatgcccatttaattatatgctgtctatggctgcttttgcactatagtggcagagttgagtagttgtcatacagactgcaaagcctaaatatttactgtctggttctttaccaaaaatgtttatcagtctctgacctagatagtctctgggtgagtctctctctctactggattttgtgtgtgtgtgtgtgtcccaagtctctttcacgcctgtgtttggattcgctcacgacatcttcataaggtgcacacataaaatgtagcatttctctgccctctgaaaatgcttcttctaagtggcaggtcgagagttgtagtggttaggagcatgggtttggagccaactggtttgtctttgccacatcctgtctgcatggcttaggccctagaagcacaaaactgctttaaagtggggtgtcagtgcctctcaccaaggactgtgagacatgagcaaagtgctgtgtgtcaggtgcctgacattgtgtgcttgttgttggctgttagtgtgacttgtgactagtactcaaacaataatagaacttgaagagtatcttcccttccccaacccatccttgttttggtgatttgaaaagagacttctgamcttctttgggatttggcaactccaaagtgatactcagaactcccgggcagcccgtgtggaacattcagtgcgtttgttcttggagtgtggagggcttttctgtgtattaactctgtcagtccagagaggagtgtgttggcttttgcctcccaggcaagtgtagagccagagccctctgcaggtcagccccatctgcatctcccagccagtgtggcaggggccatgcctgccagtgacgtctcgggaattgtgtcatggatggtgccactcacccgagtcaatgctattcttgtttctgaggtgaattgatctctgtctccagcagcctgacccaaattctgatccctagtgatcacctcttwtctaacaggacaaacccggtccacttgtgttctctaatgaacagtaatggaaatctgaggcaaggtgacatttccccttatggtccatccacacgttgttaaccctggcttctctgggctggggtactgtcctagaaaagctgccagctcaggctcaagcagctgtgggctcccagcttctctctgccgacccccatcccactttgcctgctgcctgtttcctccttgacctccaggttctgtgtgcctgttcttccctacgttctgcctgtctcctggttccctgagctttttagtcctggactggccctttggcttctgtctttcaagcctggtccttcaggaaatgtctgtcattggctggaatatcccccacattttgtgcatacagtgagaaacagatggacaaaggccctgctctcatagatgctttgttatctttggaagggagaaataataagcaagagaaagtcagatagcagtacattccaggaagaaaaatggtgatagggtttaaaatatctgaggggctactttgcactagaaggtcacctctctggaggtatcttttaaccagaatgacacacggagcagccaggtacagtggaaagagagaggtggaggcagagcatgccaaggagaaggcacggcgtatgctaggtcctaaggcctactccagggtagaagggaggccactgtagctagaacgaagcaagcaagcagtggcatggaaggtgttgaggcagtgagaagccggcagcttatgcagagccctgtaggctatgacttctggtatcaatatggatrttcttatgcagaaaccagatgttgacctcaccctatagttcactgctttctctatgggaggaaggaagtyttttccttaaggaggcacacacgccggttggasaaccagcatagggcttttggttgctggttgggggcagtggagaggtaactgctttggacttccgattggccctcattggcttgggatgctatgtctaagatgttaataccatttagggctgccgaagattgctctgaaaggttagcagctgccctgtgttgcagatccagataaygttctgagattcgaatgagagcttttgcaagtgtttccttccacctctcytgtgaaaaaggaacaaaaacaggttggatttcattaaagatgcaagcatgtaaagggttttttagtttgttttgtttttccactttttttttgtgtctctcttcctacaaatagggaaatatggtcaaggaataggaatggtttcttttttctttttyttttttttttttttttgagggctgggactgttgtgggataatgtggaaaaccactgttgccaaagtagaaatcccctgcccttgagggaaatacactgttcttgaagtgaaaatggtagggaaaaaaatagctgggctgttcagtgtgtctgagaaggcttttagttactgtatggtgacgtggctggtgtgattaaagaaagggctttctgctttaaaaagcttggaacctaaaaatgggcctctctgtggcttgggacttttccagccatcctgtggtagagtccagcctgcccagtatcctcatcaaagccaggccaagttcacaagcacgcccaggccagtcaaaaggtctgaggaagacctcagraatgttttagacaggaggagtaaactcagaataaggggctyattcttctacccctcagtcattaagaccctttctttcatgcagcaccactasttcaagtctggattgaggagggattgcacgcacatgtgtgaggttggagtctcaatctcartgtgattgtcattgccatgttcaaacgatgaggcttagaatgtcccttgtcttacctgatggycatagctctctatgaccctctgcttcttcccagctgtgtcctggtgctcttttgctgtcagaagtgcttgagcagacctcttgctgctgtggacaccctaaaaasctccgcacccyctcaagtctactaaggcatggyggctctcttctaggacaagactgttgggtggtggctgagcattcgcctgtctttgagcgtctgcatttgctctcccccaccccttcctctcttccttctttgtttgtaaataaagttggttagaacacagccatgcgcattccattctgtttcagagaagttagccttccctccttcacaggagggcccaaacccactgttactctcattctttataacactcaagctacttagcatcaagtatttgttgtatgagctgatcatgtgtctctcccacttacaatgtaagttctgaaagaggagggactttggtctgttttgttccccactgtgccccagagcttagtaccttttgcctggcacatagtaagagccatgaatgaatagcagcagcccctggtgaaactctgtgatgctctgtgtggtacagttacagctgggactcatttgaaaatcacagtaatgtttttagtgaagcaggaaatgagaagaaattccctatgggctctgcatctaagaggctccaagtagctcttatgcatgatcctaacatgggaaccattgtttattctggaaggtagttagtgtttctgttgggcggatggaacacattgtgttccttactgatgtgtgaccttgaacaagtcaccgatcatcttaaagcttacttccycttttgtaaaacagacaatataatatcatttaacctcataggcttgttgtaaggattacaaatgacaaagtttattaaggcacttagattaatttagattattcttgttctttttttttggtgttgtttttgttttattttgttttgttttgttttggagatagagtcttgctctgtcaccaaggctgaagtacagtagtgtgatcaggctctagcaacctccccctcccagactcaagccttatgcccacctcagcctccagagtagctgggactataggcatgtgccaccacactaggctaatttaaaacaaaagtttttttctgaagatggagtctcactgtattgcccaggctggtctcaaactcctggcctcaagtgatcctcccatctcagcctccagagtagctgggactataggcatgtgccaccacactaggctaatttaaaacaaaagttttttttctaaagatggaatctcactgtattgcccaggctggtctcaaactcctggcctcaagcgatcctcccacctcagccttccaaagtgctgggattacaggtgtgagccactgtgcccaaccagcgcttaattaaaatgcattcattcctattagtaatcactaactctggcttgaatgtacctgcatctgttaccacccaggcataactgttcatgtagatctgacgttgttcatttgtttgaacacagggcttcagcaacctgtttatgtagctattcttagcatttacaggggtagagcctgaccagacatgagaggaaatatgctctgtttcagaagaggtcaggcttgccaccaccctactaaactaggagatgtggttgtcattgccctgttcaaaagatacagttttcttctgtgggctgtaagataagctgggtatggccaagttcacctttggatctaaccagggcattggtggtggtggygtttctggcatggtacagcaagcaggaagcagtagtgtgcgaggccaccctttccaagaaggtgcgggccctggcrtcaggtgggggacaatggataacaataggcttgacctctcagcacttctctgattccttatcttttctataaaaaaggctaaaattcttggttcctattccctgcagctggctacatgttaggaaaattcaaagaatagcttaagaactctattcaggttccataaagcacttaatatcatcaacaggcctagaaaggatcttttaccagatttcgatgcatggaaacttcctcaatagtaatgacaccctctgcaacaccttaggaaaaacattcgcttctgggcacaagttctggtgaaagcttaaatctgtagttctaacccagaagagaaggctagtcagtgttgctgagcatctgagctgctctttgactttggtgataattgttttatgcccttttctgtccagaatctgctgactgggacaactgcagggtggaagccacctttttgtcagttcaggagcaggcaaattatctaacatgtggctttaaaattcaaatgagataaggcagtaagggtcactaagatgtttctggtgggtattgccttacatgactttagggtactggtggcactatctttgattcttaagagtacaattcattgtactatgtatatatatttaaaataacacttaatgcctttgtgactttgaaaataatgtgaatttttatgtaaaattaaagcatatgaggaagtatggagaagaataaagaataaatacactctttacctctaaatgcagatcttaccagataaaattgatttccctttagttctttaaaaaaaaaaagtgatacgtacatgtgtgtatatgtgtatatatgtacatgaatatatgcttttttaaaaattaagatactgcatttccttatgccattaggttttttttttttttttttttttgagatggagtttcactcttgttgcccaggctgaagtgcaatggcacgatctcggctcgccgcaatctccgcctcccaggttcaagcgattctcctgcctcagcctccttagtagctgggattacaggcatgtgccaccatgcccagttaattttgtatttttagtagagacggggtttctccatgttggtcaggctggtctcaaactcccgacctcaggtgatcggtccccctcggcctcccaaagtgctgggattacaggcatgagccaccgcacccggccagccattaagtatttttgatgactgtatacttttcgttttttatccatccacttaacaaatatttattgaactcctgatattaatagctagtggctgtaaacagagatgacaagcagacttggtctctgccctccctaagtttacagtctagtgatttattctatcttatgaatggctgacataatgtaatttaatctttttattttgtgtttgggtaatttccagttcttatctgtaataacgctattttataaataacactgctttgaatgtccttgtacataataaatggactgtatttgggtcattactgtaactctattatctttctgtggaaagatcactctaaaattaatttaaaaatatataattgatgaaacttgacattcctgacagtcaatggaaataagaggttgaggttaattcttttttcawtagcaccttcctttctcattaacgccctgtctttgcyrgtttctccagagcagcaagtgaagctgctctgtggctctgttgttcaygctctgcctctcgggcagccatggtgaaagggatttgattcatgagcaggcacagatgtaaataatttttggcatttcagatgtaagaccttgctcattgcgtagttggttctgtgccatagtatcatggckgccgtaccttcacagtagatctcaaccttggctgtgccctaatccttgacggactctgcagatccggatttagtgtgttgaagatgcaacctggtaactgactgcacaaagtgagtctgatgcacagcagggctaagaaccactgctttagaagcatgttccaggaaaaatggggtggtggacagcatagctcccaagcatggccatttttgataattcctcaaatacggattgattttgatgatctgggaaatgaaggtttaccacccagtctcacagcattagctgatagatctataaaccttattccaccagcagggccctcctttttactgagatcccatctccttgaattccagagatggagaaaagtgtgacttgcagttatagctccttggctgtctgctcaaggatgtgtctgtcaggcccttccaatcacttcttacccatcaataccatggcttcctggaaatgaaaacttaacagaagctgtcaaataacctgttccaatgcagtttaatcgaccttaccatttatcaaagaatgctggcatgatagaaaccaaagcctgctttccccagagagacattttaaatgtttttcaactactttgatctcgtcttcatcatgtacagtaagttttaggaatgcagaattgcagtagtaatgttgggattaaatttttattgcaaaggctttgaagcacaaacaaaattttaaaagctcattagtaattgaaaatgataatcttgttgaggacgcattttatggctataataactataagacgcaatgaaatattaaaatatactagaatttggagtaatatttttctatttttattaaactatagaaattatttgtacagttgtattgaacaaaagggttaccattaggattaaaacacaaatggtctgggcgcggtggctcatgcctgtaatccgagcattttgggaggctgaggctggtggatcacaaggtcaggagtttgagaccagcctgaccaagatggtgaaaccccatctctactaaaaatacaaaaattagctgggtgtggtggcacctgtaatcccagctactcaggaggctgaggcaggagaactgcttgaacccaggaggcagatgcagtgagctgaaatcgtgccactgcactccagccttggccacagagcaagactccatctcaaaaaaaaaaaaaaaaagattaaaacacaaaaatactgttatttctttattttattttatttttgtttatttgagatggagtattgctctggctctgttacccaggctggagtgcagcggtgcaatcttggctcactgcaacctccacctcccaggttcaagcgattctcctgcctcagctttccgagtagttgggactacaggcacacgccaccatgcccagctattttttgtattttttggagagacggagtttcaccatgttggtcaggccggtctctaactcctgacctcaggtgatccgcctgcctcggcctcccaaagtgctaggattacaggcgtgagccgccgcgccagcctgttatttctttaaagttgtgataaaactgttaacaktttttggaggtttaacagtaaaatacaaaggtgcaaaataatttcattgcccggaaaggtataatttattgagccttatttgtgagagtactatagtttgtttcactcattcatttgttcacttacgtaacacatgcttaatgtgcctagcactgtataatgatacagatatgggcttggcgtcatctctgtcattgtgttttttattaacmacatccttaatcttgggttggctgctttgaaatggtgactcaggtagctgcttgagttgamaatgaacttttttctttcatattgggagagaaaacatgcctacctaggtaaagtgcttagagaattcaaggtttttagtagscttatattccgtcttcattttaagggagaagataaagaaagagtcttaattttaaaaaaatcttggatcacttgatgtatctggtagtctccagtgtcagctggtggatgtttagtgatactgggtcgggtggacagagttaccacaggacagggacatgagtgagtcttaagagtgattggtatatgttgttmcacraacacatggcaaaatcccagaggttattccctaacmagtagattcagggggagcaagtcagagatgcttgctggtggacaggtccrttgtagttcttaagaggtggtgaagcatggtgggtaagagccatcagccctggaaccagactgggtttgagtcctggatctgtaatcacctctgctaagttatttagcctctctgtgctgtgatttattcatttgttaagaggggcatagggatgatcacatgctcctcagactgtcttggtaggattaaatgaattagttcatgtaaagtgctcagcacactgcctggcatatagaaagttcaataagtggaggaggttatattggggtggccgtggtgatggtgatccctcctcctcattatgaatccccttttacactccatgtcacacagtcacagaaggtcaatctttggcagatggggtcaacaagagatagtaggtcagttgtatttactggtcactgtaatttgagaattgagggagaatatcttcttaattgtaagtatgacaacttcatatcctacctagagtatactccactaataactatcaccaataacaatggattgagggactgtgtccagtagtctgatgagagcccatcagcattggctcatgttctgttagctcccccatagggaggaaggcagacttctctcactgcaactttctgttgtatttgtagcagtccctccagtgaatggaagtcacacatgatgcaggttcattcagtaggcatttcctatcctgtaacctctctatcacagttctctctccatgtctccacagaggggcagtggggaatacagaggggttgagagaatgcacctaattcagcggttgtcaaatcagggcagttttgtccctccaaaggatatttagcagtgtctggagacgtttttgattgccacacctggataattgctgttgtcattcagggagtagagaccagggatgctgctaagcatcttacaatgcaaggacagtcaccacgacaaagaattacccggcccaaagtgtcagtagtgccgaggttgagaaatcctgagttaagtcacactagagggccagggcttctgtgcttggccaactacaattaccggtgatagttaaatgctattctagattgtattcggattctagctggctgatgacacagrctctaggcaaagaggctgaaatgggggagattgatcttttatatctgaagagtatttctttatactgaacattgccacttctcactggcacgactgcccccttctgtgtgactggcctctggcactcttcagaactctggagagccagttgatgcattagacttagtgacagaacaggtgactgactcccgctgtctgtgccaactaatgatgtgcctgtgacaaactgagtcatgctgaccgtgggactgcagaccgcagaggagagtgctctcatgaccccttggataaagcagtgaagctttgcatcacctgaggagagagttctttgggaaggatgagaacattttccagtgaaaggttttattttacttatatatttaacaggcagttatgcagtgcttattatgtgccagccagtattcaaaacaccttataaatattaactctttaactcctcttgacaacctcaaagctgaagtgttgttcatgtccctcttttacaggtaaggaaacaggaatgccagaggtaggactcaaacctaggaactctggctccaaagtcaggcccttaaccactgtgttatggatgaaagactctgaacttcacccttggtttcttttttctacccaggttcttgacttctgattggtcccattgagatgtcagggaattaagcagtcctgaggcaagccctcattttatcagctcattatttaatatctgtgaacctcagttttcttatctgtaaaacggagtcacatctacctcatggggaggatgtgaagataaaacagttgtccattttgcattgctgtaaaaaatacctgagcctgggtaatttataaagaaaagaggtttatttggctcaagattctgcagctgtacaagaagcacagcaccagcatctgcttctggttcatgaggcataatggaacaggctggtgcacctttgttgagattcgctggctgtgatctgtgctgtttatgtgagcaygtgtgtttatttcatggccagattaccgcatctgctcagggacaagtttgctctgtttttaggagaatggaagatggcaccttcccgtttgtcttaactcagggcttttctcagtcctgctacccacactgtgcacttttcccctggcccactcccaattcagaaatgggtctggattctatttctgtggatggttatgcagtcacccatctgcttttctgacacatacaagtcagtatatctttctgtgattatgaatttttagaggagagagtctaagcttatcttttcttttttctttgaatatcttgtctacaaatagtaaatgcatccataggggtgaagaaggagttcctgtaatttttccagagggaagtgcagtactctttaatgtgtagtcagatgtgtgagaaagggaaccaactcttaaatgtaagaacgatgagagtatatccccagcatctagaataatatctggcacatagtagtagcttaataaatatttgtgagcaaatgaatgagactaatctttattttaaatatttcctaaatctgattatagtcaactctgggttacctagcagacctgaaaatctggagctgtagcttttatgaagtgttagtgtatgtaactaacagaattaaacactttttaaaaaactgggacatgctagagtatgcaacacgaaaaataacaaacttgatccagaggctactttgggatcttgctgcacccttggggtgtcaagctttgtgtgagaaactatggtgctgtaaggaggaggaattcagtgtagtgctatagcaggatgctaaataacaaggagttttctctcttgaccaagtagctggaaatagttataccatgttacttattgccagacttgcattccacgacagactgatgtatttagtaggatctgggccagttgaagacggcccttgtcatctttcagatgtggtttgacagatcttttgtatcacttcagaaacatttgagaagttttgttctccacgataaagagagagcaagccagacagatatgtagaggccatagaattttaaaattgtctgcactttcttttacagatctgaagaaaacccttgctgtgttattagataacattttgcagcgcattggcaagttggagtcgaaggtggacaatcttgttgtcaatggcaccggaacaaactcaaccaactccactacagctgttcccagcttggttgcacttgagaaaattaatgtggcaggtaaaaatagcaattctctgccctgatatggagtcacaccctgctttggaccaagaagagaataaaggagagcagtggttcttactggaacctgcataatataaattctataaacttggcatggccattgtaaagataagtctaaatttattttttaatagcagatgttaaaatgctttttatagttttatcatgatgcataatatttggtggtttgtgtgacacatttgctcttaatgagctcctggaattcacttgtaaagagaagattcatggcatagattaaatgaaatacagaggttatttgagaagcttgtgccttttagagttcttcctcctccgtactcccatcagacaattttgaaagtctgttacgtataataggttctctcctccctgttgttaaaaaagagccaccattgccgaaaatgcctcctatgtatatatggagaaatagaaattctggaaatggcttttaggagataacccctgcctagtcgtaggcagattctgtagccactcatgtacaccaccatgcggttcccactgggaggcattttgtttggctccttctggaaactggaatattggatgagacaaggaaaattgactaaaaacaacacccagattatacgctgcatgttgttgcctgcagctcacattagaacccccccayccccgcaactcccccaccatcacactgctctgaggtcagcccctgggtctttgtgcttgarccaggactgctcttgttagggtgaccacgattttctggggacccaggacaaagtgaagagcctgaggattaggattcagtgctttgggtgaatggttgtgaacaagctgtctatacttttggtgggtggtagccaaactctggttaatagataaagtaagtaactaggttacttttgacatcagttcctgctttaaaaaaaaatcttgtttcatatacttttaagcttattttcctttcccttttgcttgtaaaaattcacacacttaagtgggagagattctttacctttcccacctcccagcgtcaaaacatttaattgttttacattatgcaaggtggttgttattaccttttttaatgttctttgccctttagcaaattttaaattgcaaaatatatttctaataattcaaagtattcaaccaaacaaaggtattaaaaataacttttaattacaacacagaggcagtgtcatctaggccgtaaatcctgtcttccttgcagtttccaacagcttctgtaattagacaagagaacctcccactgtgtttagctgctttttaataactggaaccatgcctcttcagtctccacttgccacccctgtaccctgtagaaaatgctactggaaaggccctatgtggtttcatcactgttctgtgtcatatttctggaggtgggatggagtgttctgcctttaactttgctgttctccactgcctctgaagtcctgtggcttgtgagcctctataaacacatctgctgtcattctttcccccatcgtggcatcttgctgcctctggctgtcctgtttgttgcaaggctcacaaggactttgctacctgggctttaagccacagagcacagggtcgtgggtacacctctaagaaggaaatgggaaggacttggtgactactttcaaacgaagtctggaaatataccagccgtatgtattgagctagtgtaccgcttaacaagcatcatgttctctaagccaatggctctgagcgggactcctttaaatgtgccactggtgctgtgtttttaataatatttaaagaaccagagtgttgtgttttgttttttttttcctttttgggcaatgggagcaaatttagagttacacatttaatgattaacctcatttgcatgtctttgcatctctcgggtatgtgtgggacacagtccataccatcataatttttactggctaattaggaaaagaatacacatgcataaaatgacacaaaccatggttgctgtaaagtgggggtgactcagaaaaaaattgggaggcagggaaggagaggaaactaacatttagtagctgtccagtaaatacaagttcctctgcctgaccctccaatgtacatgattttacttaatcttcttagcatctctgagaagggttttcacaggttttgttgagtttaagtacttgggagtgggtgactgttggtactggagtcccctgagctcagcttcagatctgctagtgctatgtagagaagagattctgagtgttaactccatctctccttccatttgtaaattatcataaaggcatgtgtctgtaaaaagatgctaccattttcttacctagaagagagctgccagtttcctagatttaatcatctgtctcattaaggatttctctgtctcagtgtctgctctcaggctaatgtttgtaaaagctggcccgtgtatgtgtgtgtgtgtctgtgtgtgtgtgcgcgcgcgcgtgcgcgtgcatgcatgcagaggcatccctttcatagacactgtcttggccaaagtggatatagatatgctggacagccttcttcatttcccccagaaggtgggggggggtcctttatatcttgtcagtcaactacatatttttaaaaaacgatttgccatgtctatagagtaccagaaagaaggacaaggacttaagtgaacagttctcatttatgagcagcccttccttgcttttctgccctctctctgatccataaccatgctgatgtcttcagacccctctgtcaacccaagaatggctcctgagctgtgagagttcagttttatggggttccaatcctcgccaagtaaagtttttctctctcccttcctgaatggagacatgcggtaattgctcagaaatgttctccctggtgtgtctttacagctgactctggtgtcttattgctcactgatgtttctgattgcttattgttgtgtcttattgcttgctaatatatcttctggttggctataaactgtctctaaattgggtaccatagcaattgaagaaggattccctaaatttattttctttagggggatagctctgtgtgtgtgtgtgtgtgtgtgtctgtgtgtctccttattttttctctctagctgtgttctgtgtagcttttatccagtatggcttatcttcacaaatttatcaccgagggttttttaatgtgaaagtaaatttgcccctagggaaatttaggtggaaatgagctttattaaaatcaagaaatcagattgaactggatttttgagctctgtttgtcttgttgaagagaaaggggactcaaaggaatgaaaaagcagatttttaaaatccccacccttccaccaatcacacagtaaattaatttctccatattcactttctgaaagggcttgaagggccttcgtcaaaattctctccttttagaatgatgctttgaattttagaaagacccattctgtctttctctagttttgtgatcttaagtgaggaagtggagcgaataggattggatctgtggttctttgtcatgtacctgaaatggggaaaaggtaaaaagtatacatatctgatcatgaaaatgcttgccttctaaggactgaatgtctgatatatctttgttctgcccatagtgtcttgattgtagccttacctgttgaagataattcagtaaatattgctcacatggattggtttctattggagggaacagcatttggtttcaccacctggargagtttcttcttatagttcttcttctcaatttacatttgtggtgatttgcctagaagtcggacttggtatttcgtttccctagttctcagaccttagcagacaccgcctaagaagtgggactgccttttttgttggtcaggactgaacttcccatcaatggttatgggatgtggaggcttcataggatgtgatagttacaatcctagatgtgatagttacaatcctagattgtgatactttagaggacaagaacattgtgtagctctctayggggtagtgtatgtatgtgcatgtgtacacatttatttatactctcaataaagagttgtcattcaaggtcagctgaataactggccagtgctgactgttccttaaaagccaaaaccataatgatagcatccaagtggtgttgtgatgacttaataattgcaaggtcacttgggaagcagaaccacaaaatcaaaggtacaggtataactcaagcgacagtttcctggtatttaatccaagttgaacttacagcaaccctgcattttttccaaagtggggagcgatatgcaacactttctagtatttggggttgaagtgcaatgtatttgaatttggaagctgttcttaaaaacagcaaccattattattattcttaccatttgaaagttgaaaatgaaaaatgtccctgctgagttccagggcttgcatttggaagtgcaatttccccctctttgtgctgctaatggaccttgaaatttagttgtacctgtgctctttccttgtatgtgtacccatgtcatcagtttgtgttgaagtagcacctgaagtgtcccagctccacccctgggcagtggctcagcagatgactttcccagggtcagatactggtatgtcagtgagatcccagatgctactgagagacgggagagagatgagattgcaggtggcttcctattaagttgagcaagaagcaaatatgttctgtctatctacctgtcactttctgttttgttatttgcaatggtaacaataaatatgtggacccttgtcagaagctattcttttggtatctttacagaaaaatgcttgtctttgttggtatggttttcactttgtgtggtcaaggatattttgtttttatttagaagaagaaagacagttcagaagtgatggtgatctttgaggaagtgaatttatagcagtgattaacagctgtgggcgattttgcccccaggggacacatgtcaatgtcaggacacattttggttttcacaaatgaagaggtgctatttcctttttttttttttttttttttttttgagacagtctcgctctgttgctcaggccagaatgcagtggcactatcacagctctttgcagcctcgaccttccatgtccccaccccctgccgcctcagccttctgagtagctgggactacaggcaatgtgccatcatgcccggcaaattcttttttcttattttttgtagagaatggggtcttgctatgttgcccaggctggttgggctcctaggctcaaacgatcctcccacctcagcctcccaaagtgctgggattacaagcatgagccactgtgactggcctatttatttctaatagatgaggacaagagatgctgcaaaaagcatcctacaatatataagacactgcccataatagaagtatccagccccaaatgtcaattgtggcaggtttgtgaaattccgatctatgagatactgttagaatctggtgccagcagatattttcacctatggttagtgcagaaagacgcctgagacgctgaagtttcctgattgccagctgagacctaaagttcctttcccttttcctagcaaggctgttcacaagcccccccacccccgccgcccgccaatctccacctcatttagctttgccactggtcttggaggcctccaarraaagagattttagaaactcccagaagactattttaggatcctgcccttaaggaactcctttcctggcccacagtgtgcttttggcaatgtacattttacttctgcttctatagaaggtaattatttcttctcgtgaaaggaccactaattccggataacaatggtacaaagtagtcttagagaatgggtttaaattgcagaatgttttagaagaaattctttgttattttaagcaaagtatataattatcaagatatgagagagtaaattaaataagttaaagaaaacaagacaggtccccaaagatctactttacatcagaaaatacccttsacagcatacttggagcaatattgaagaaaatgagactagagagttaattgggatttgtgatgcattttcaatgttaaatgaaggagtttctattttgttccctgggccgtggcagttgatgagaggtttaaagtaggaggatgaataggtgtgaggtctgtatttccagagaataattatgggccatgtggagtgaaatgcatatgaatgggtgagagagactgcatttaatcttcagttaggaggagaatgccctgggttagagatgttcctatggcccagggagaaagaatttgagacccacgttagggtgaagctggtgttatggggacacggacagaccgtgggacagggcaagggagaatttgtcataattatttccaagggtgtagcttgaaggatagctgggtgactcattattgaggaaacaacccagcagagagacaaggttccatgaggactgtagccacaagccatttgtttcagaatatcggtttaaaggcagttgaaactttgatgctagtgttgaggggatgagggacaatgaaaggcagcatctgtggaaccagactggctcggttcaaatactggctccaccacttcatagcagtgtgactttgggtaagtttcttagccttcctctggctgagtttccccatttgtaaaatgggggaaataatagtagtgtccatttcacagtattgttaggaggtatattagtccatttttacagtgctataaagatactacctgagactgggtaatttataaagaaaggaggtttaactgactcagagttccacatggctggggaggcatcaggaaacttgaatcatagtggaaggggaaggaaggcacgtcttacatggcgacaggagagagcgagcgagagagcaaggaagtgccacactttaaaatcatctgctctcctgagaactcactaccatgagaacagcatgagggaaactgcccccataatccattcacctcccaccagctccctcccctgacatgggattaaaatttgagatgagatttgggtagggacacagagccaaaccatgtcaggaggattaggtgagaccaataacgttcttagaaacatgcttggcataaagtcagtactgtatgagcatttgttaattacagtttaaaagttacatatttggaatattgacataaaaatggaacactgtagtgacttcttatttggatatcaccactaatagtgaaattaatatgtgtatagtgctttatagattagaaaataattttgtatatagtrtttcactggaacactttaaatttgaagttcccaaattgatctttttgtgcctctgttatcaatatttagctcatcacgaaattcatgttttgtcaataatctcttggttgcaagaggccaaccacttagcttatattaacttaaactaaaagggaacttggggctcatgtcatttgaaagtttgtgggatgctgttgagaggttcagacatgggagccatctttaagaacctcagctgtgtcctctcaggtattggatactgtcagaagccatttcttttggtatgtttaccgaaaattcttctcattgttggtatagttttcactttgtgttgtcaagagggttttgctttttatcattaagaagaaaatacagttcagaagtgatgctgtccttcaaggctatgttaatatgttctgtcttttattttgccttcattcttaggccatctttgcatggtgagggcagagatggatggtcccaaggaggctctaggttttagttttcagtcccagacggctgtgctgctttccaggaagttttggcaactctctagagcagggtcatgattggcttggcttggcctctatgcctattcatgatccagtcagagtgaccagtatcatgttccatcctgattggctaggcctgggtcacatgggtcacccctgggaattcatggtataggagagggtccctgaagagatttcagatgagcagataaaatgcatatggctactagagaccctggtcatgtcatggtttggctttctggagctatcctaaacctgactcaagcttttctctccctgagtgtttggagggcaaagcctcaggactgctaaatttctgcctccattttaagcactactgtggccaaatgtgcctcagccccacttggaacgagcccaaacccctgcctgcagtttattcatgctcttacacacttaacatgtttttgtccacagcctggcatgcttctgttgttctggctgactcttctttaccacttttttcaagtctcatttgaagctctgtctccctaagacttgcttgatgcccctcacatcccagaggtttgtgatgtccttgccttgtgttcctaccatgtgtgtccttggacttttccactctttgcttgtcttcacagccagtctgtaagctcctcaaaggcatgggtgggatctcatatttttcttttcagttcagtgctgagcttggagtctggcaaatcacaggtttttatcaataaatgtccagctgggtacattcctccctctmctaaacacaactcctgccggtcaggcactgtgtcctagaacctttgccatgacgctgatggccatgctttcacttctagatcaccatttctgccacttatgtgctttgacaggtccctgaatccttttggaattcccagaagcacctggaaagtttactgctaaattgttaagaccggaagagcctttgtttcacttcacttttgaaaactgagattccataataagaatttattttgtgtttcttggtggctaattataaacctgtaagtaggattaaaaaaattcaggccacctccactacctgagaggttgctttgaatgaatagttcttgcagaaaagaaacagggacccagaatttctaattctgttggactaattactgacccttcaaggaawacatggcttgtttcatttcgaaaagtgagactatatatatccctgtcgggaataatgttcctccccagccacttgatgggggaactcagtaacatacactgcagggctgtcctggggaccttgaaagtgcgtctactcagggttgttctttgtattggtgataggacatgctgaaattagacttgtttgttttaatcagaaggtgacagatcccacttgcttaatttggcttaatgaggtatgtgtatacagttgtgatatcagcttacatatggtattgattcaatagacattccacagctacagcatagcatatgcttcctcagatagtcccttgtctgtgctgtttcatcctttacctgttttcactgacaagtatttcaacaaactcactgtagagcctgagatcttaaaatttaaaaaaatacttggaataaagctgatttggtgagacatggaagagaggtatctgactccatgtttttgaaaaggttttgtaggtttgaagatttctggggttttgagagattttcctttaagctgtgcttttggctttgcatatccacagcttctaaaattaggcagcctaaataaaaatcagttgctagtttttgtttttcctttctcgcttacatcccagaaaaaggagagaaagcaatgcggggtgaagatggtttgaaattctttgggtttagaaatgacagaaagagggattcaattaggggtgtgactgaactgccctacagttcaggacagcagaaataatcttcatctcacagcctccttcttctgtacttcttttacccttgaacattcagcaagtctcacgtgtgggatcacaaaccccaaatctgcttatgtcaagcagagggcccatggcgtggacagagtcacccgaggacgacatgtctgggattgacagagcattataaactgcattttgatttgcattgtcagagttggacagctgcactcttagctggttttaagctgtcttgaagtttcatgttggagaggttttctagtcaacgtttactgtggaaactttcctttaccttggtgcagctagagatgggctcttgaaccagagaaaagtggacacccagtgaaggacttgtgctaatgttttcccccytcgggggacttgattaaacarcagccacatgattatgggaccctggataaacccagtcagtttcctcattgataaaatgaggataagagcctgtaccatggtattgttgctaggagtatgagttaacacatggaacacactcaaggtgctgggcacaaaataagagctccgtaagctttggctattgcctcatacgcttcttaagtgtccaactcaggttttcactcctgggccaggcatgtagcagatggtcagtgcttaatgggcatgtaaactacccattcccaatgttgcattttatacagaaaaccggaccttgtgaaagggctgtccagaagctacttggcagtcacagcctggacctggtctttggcatcagacatttttgagcagaactctgggtccacttacatacttgctgttagcattttattatacttaaccattgctgaccctccgattcatgctctgtgcaatggcggtagtgacaccaacactgtcctcatggtgaggatgcaatgagatgatgcatattgagatcctggtccaacatcttcctgtgacctacctactgaccttgccctctgtgattaataccgtgttacaaagcagtggtcrcaaacataacgtggcaaacactgatgtatcttttatccaacctatgcggacagcatgatgccaggtctgtgtcaggcatcggaaatgcagctgggtaggaaactagggctccttttgggaatgttgagttcaccatctaccggaggagaatgactgaaagtattggttgcgctcatgtcttttttgaccctcaacttgtagatgcattcaccctagtccaagaaaacctattggctttgcctgaccttttggccttagaaatgaccttcaaacactatagccatctcaggatagggatagcaatgatgtacaggaactggcacagaaggaattttctcctgtcacaaggcagaagttgtatggctcctgtgctacttgtcacagcaaacttaagcagatccagaaactgcctgaccctttactgtaccttcccactccaaaatggggaggggaactcctgtgcgggagtgctcagctctcaagggaagayagtcattaacctgtctaaactctatgttaatagaaccttctcgataattgctttcattaagtgtggttaatgtgaacagtacaagttatagcaagatttgcagaagaacaaagtaaatatttaagactttatttcaggatgcagttgggtcgaggcaaggagaagattagtagaagctgtmtctgatggtatctgaggttgaaacacagtgaacctcttggcagaagtgccagtcatttctcatcagtggttcacagaatcctaactctggggaggcagatgggtgtctcctggagatggttgtgtgttcaggttttctcctttcgcttctggcctctgtcagacatgaatgacatggtgatgaagataaactgccttccctgtactgcccaggaatgcaatgaggattaagaaggtggcttttagcctgtgtctatgccacatggggaggatggttgctccctgagggcagaaggccattattagcaactgagttggccaggagtgtgtgccatgccgggctgggtgtacggagctgtcaagccaggcacctggggattaatttagcatgggttttcatssccccgggctaccagtgaccatacagccatcatctctacctttgagttgatgtgtataactgaataatagtgctgtgttttcaaaaggaaaggcttaaaaaacagtgcttctgtagtacaaggagggatgcyctgctgaaaatctggaaattacagctaagcaaaaagatgaaaatamaaagtagctgttattctaccacccagagatcgatttgtttctttactaacagatacggcaagtgcctgttctgtgccaggcactgtctaggcactggagatagtgatgagcaaaaccatctcttctttctggagatkacactccagcagtgaaggcagataggaaacaaatacataaacacatctggtgaaaaatgcttgaggaacagcaaagtagggtaagaaattagcgaaggaagtgggtgctgtttcaggtttgaggcttgtcaagaaagcctctctgaagaagagagattgagcagagacccatattattgagtgagggaggcctggggytctccagctagctgccagcaggatcagtctgtacaacarmccagggcacattcttcctgggtgcatttaagaaccactgttgggcccttttaattctaatacagaaggtggcctattaaaaccaaaaccgaaaaaaaaaaaaaggaccctttactgtatcatctgtcatttatgtttctgctaggctcaaactagacttttgagagagcagtgttggaaccacagaaaggtctggatgtgttaacgcattggttcagcatgtgatgagacttgtgtgcgcagtacagactcaggctgctggggttcaagtctgagttccacagtggtgcarctgtggtgaagtcatttagagaggttaagtctcagttctctcatctgtacagcagaaactagctcatggggccacatgagaaagtgtctgtggagggagggctggcacatggttaagtgctcaggaaatactggctgttgctataattaacaaaatgtggttttggcaaatggttttaagagggtctgtatgtgcctttgttccataagtttttaaccaaaactaaggagcctcgaaaattatgttagaggcaccaaatggggagcaggttctagtcattcatcaaagaaggrgctaaataaaatcaagatttaacagaaggatcacacatttgaggtagggtttggagtttcagtcatgaagtcggtgcacagtttatatagggttcaacttcttgtctgtaggtgcctgtctctattcacatttaaagccattgttgaggaatgtagtatctttttttttttttttttttttttttttacagaaactcttctcagtttggagaatgtgggtgtgtggctttgaggcttcagaatcccaccgtgaagttgtcattggtcttcatggttatttatgaggcttgacttaagctgggtcctgttcttaacaggagaacgatacagcttcccccggccgctgggttctctttctgtgatgcaaggatacatcgctgcactaggctctctgagaaatttgtgactggctagcaattagagttgagaatgtaaactggccacagattgaggaattccaggctagagactgtgagccctagtgaagaaatgtagggtcagggctcaggaggctgggattaagcccactgctgacagaattgatgctgagaccttcagcacatcacattatctttgtttcctctttcagatccagagattcatgagcttttataagtggaaaagatttagatgttctaacatttcctccaaatgggagattgcaactttccaaaatccttggtggatggttctccagatttatctcaacagttctagtgctggaacttttagctgccatactgttgaactttagtgggccacatttacatagcctgtgtcaggggtcaacaaactgtggcccatgggccaaattagtccactgcctaaatttataaataaagttttattagaacacaaccttgcccatttgtttacttactgtctgtggctgctttcatgctacagctgcagaatttagtggttgtacaggagaccataaggcccacaaaaytgaaaatatttmctatctggctttttacagaaaaagtttgccaacccctggcctaaatgaatggtgctgtctggaatgcagtacatagtctgcatgcaaccctgtgtgctaaacatattagatttgtaaagtgttcataaaatagagcaaaaaaaaaaagccactgtttatggagagatcgctgtgtcccagacacaaataataactttaaaatactttattagttctttcctcagagcaaacctgcagaacagttatctcaatttaagaggatcagggtaggatatgatgtgtaatctacccaaaatggtggcagtctgagccagggttcagatcctggctggtgcatctctaatgtgcccattcaatctgccactgctgggacaatcgcattttattgtgcatcacaccagaaggtcacgtgtggcatttttaaagatgaaaatagtttaaggctcaagagtggaaggtaatctaagagtccacacctttctggccatttggatattgttgtaaatgtttcaggtgttaagcatacttaattttgtgagttttgattttttgttttggtcttctttttgttattgtgtattgattgccctttgattttcttctttaccgttatatattttaaatgaggtaattgtctctagagaaatatctagaattgttttccaattctttttctgatttaaaaattaaaaacactttttataatgcttgataaggccaagttatgtaggaaatttggaaaatacagaaaagaataaggaaaaaaaagtcttgtaatcctgttttctagagcactgtcaatgacagctttttttttctgtgtgtatattgcataaagattataattgtactctttgttttaaagtcttgatttttaagggagcattctctttattcttcaaaagctttatttttaaataactacataataactaggttctcaatttttgtttttccttttttctactacaaagatcattgtggtgaacataaatctttgcattattctcttgggagagtttcttagaaacagaatggctaggtcaaagggcataagccctttttaagtttagtatttatttctgtcaaattagtacatgtatataattttaaaagtataaatttaaaggtcaaatagtataagactgtaaccagtctgtcttctgctatatacttcattcctccttacccctgacttttgttctggaaacacaaatacttctaactcttgtttcttccagtaatatattttcatatttctccataacatgtttatgttgcttttttcttatcttgcatttttttgaggttatctactgattttctgttatggaagatgggaatttagctctctgacactgccaccattgccagcaacccctccgctacatggctcctctctgttttccagaatcagaatgtcctaaatatttgctggggtcaaatttagtggtcagtgcttactttakaaggacactgcttagccacttactaaaataaaataaggtgatagtaaattgccattctgatacatctttctgtttttcccagcgttaataatttacttcttatgtttgcattgttttgattaattaggacaatatttactaattatcttctgtgtgccaagccacacatcagtgaacaaaacaaaaaaaaattcttacccttaccaaaattcagccctaaacattccatcagagaacccttcttactgyggcccacagatcaaatagtttaccatgcttttattcagtagtcgtcttcctgatgctttctgccctcctgtgacaggctggcctggctgcatcctgggcctgctgtacagttgtcgtaggactgtttccaaagcccctttycccctttggtgctgggtcttttatttcttagattccacattttcccctttgttggtttcttgcctcatcctgtaatagttttctgagagaagaaggtaaatggaggggaaatcatgagatttctttttctttttttttttaagatggagtctcgctctrttgcctaggctggagtatagtggcgcagtctctgctcactgcaacttctgcctcctgggttcaagcagttttcctgcctcagcctcccaagtagctgagattacaggcacccagctaatttttgtatttttagtagagacggggttttaccatgttggccaggctagtcttgaactcctgacctcaggtgatctgcctgcctcgccctcccaaagtgctgagattataggtgagccaccgcgcccaactgaggtttcttgaattttggaaaatgtctttattctgccttcccacttgaatgatacattcgttgcatataaaattctaggtttgaacatgtttttccctaaacaatgtgaagatcttgttcctttgacctctgcttttcagagtcatttttgcaaagtccagaggcattatcacacctagatgtgacttttggccttctggaagctggtgggatttgcttctaccttgtgttcagatgtttcctgtgcctggtgtggaccacatttcatccttkttctgactcttctgtgacatctttcttgtctgggaaatttttgtgaactgtttattgagtagtctcatctccctacagtctttcttctagaactcactgggtggattgtgcacattggggctctattcctaccccttctctcatatcacttttctctcatcttatccttcctgttcatcttatggctgtattttctgtaagattttcacaactttacatccagctcgtctcctgaatttaattcttctattttagtcttctttccaagagttgttgttctctcaaggtcttttaaaaaacaaaaatcctattcttgctctgatttcatgaatcaatattcttcgctcatctgtgaggtattatatttaaaaatattgttaaatcattttctgttgtatgtatcatctgagagtttttctttttcagtttgagttcacttttctttctttggtgtgagaatgttttctcacatatctggtaatctgtagtgctggtttcatatttgagggtgaggttggctgtgagtgagggctggcagctgctgggccacctcctagggaaccatagatgacgttggaccctaaatgtctatttcagtcttttctcttctgcttagtttcctcatagatggatccttcagccttctgcccaggggctgccagaactttgcttcatagctagagaccaagaccttttaaaatttgtagtagagacctcacttccttttccctaccctatccactgttgtgaatctagagccttttttgttcaatctctctagagagtaagcctttgctatttataactggaaggctctagtataagcatcttaagacttgatagacattacaagttatactctgatcaataatgtatgaatattcctgtcttacatcctctgtgtaaatacttggtattttcctttgaaaaattcaccagtgtaataaatggaaaatgatattttacatatgtttctttgattgttagagaggttgttttccatatgttttatgggatttgtatattttgtgaattttctgtccatgtctttctttggtttttattctcaagtgcttactgaattttgaattctcttgctggtgtctggaagcaaaggcctcctttatttttgctggtttggcatgattttgtctcctgacatggctctggtagtttcttgtgagggtggaggcacctgaaacactttatcaggcacatgatagacattgcctatcaaatggctcaacatcagttccacaaaaaacctaaatggccattcaagacctgtttctgcctgtttcaagttccatataggaattagatcagtagttggcaaatgacggcctgtgcgccaaaatctagcccagtctgtaaataaagtcatgctggaacacagctgtgctcctttgttgatgtgttgccgtgttgcctgtggctgctttcacatcacaatatcagaaattgagtagttgatacagagactacgtggrcagcaaatctagaatatttaccatctagctctttaaaaaaaaaaaaaaaattcaacccctgaagtaratgtttgtttgtttggtgcttgataccatgtaagtatttgcaaaggcttatggaaattgatggttcattgttcttatgaataaaaactaataagcatgaatgtcatgccttttgcaaaaaccaataaatgacagtggcagtcatcttccttcaaatgatgtatgtgagtgtaatacctctgtcagcctatcttcctgtgaattcccccgataactggtttccagaaatattgctgttgtagccatgctctcccctgacagccacccattccccttcccactcttctccctctcccctactcccacaccttctggaaatatcagatgtacaaaatgggcttcacttgctcaaacctctcattgtcactgttttcacagcattgtaaaacacattacattaaaaaacaaaccagctggtggaagccagtggttagcacctagaaggtgaaagacttggcgcatgtttaaactgccagtcttttttgggtgcccttcatctcccttgtctctagggccccattatttttcctgtggcttctctacgtccccctgtgtggccatcacttccatcctcttcaagacccagacttactcctcaaggtctctgcttgccctataggttgggcaccgcagtgtgccagtctctcctcttcccacatgccctttgctcggcaggactgctcttctactccatggacctgtcttgttccctctgactttgagaaggcaaccattgctgggctgcatgctcttggggaacgcttttctcttccagggtgccgatctctcttctgtggcccttcctaagtccttgccaatactgccccttggtagtggcccgggcacaaagccatcagccagctgcktcctgccagtctcccatgtgctacctgagtcagcggaacactgtgtgttgtgtgcatgtagatgttgagggactttggtgtggttgcagggttctgccgaaagttgtcagcgtagcaggcctgacatagctgtctttagaaaggtctgcttgcaagactaaccatggactagcatctgagaatttggatcttggaaatccagtttcctaccatatgctgataagagtgactgactatgcttcaaccatgtgtacaaataatatggtttatgctgaacacctgcattccttctgggagtctggaatcttggcacatgttaggtacagtgaccaacactcagtaagacacagagtctctaaagaccttccttggtagaccacatttgtcgtcacagctcgttgctggaggaattaagcatgccctatatgactccgctgggagaggattcttggaagcttgtgcctggtctctggacattgccccatgcacctttttcctttcctgatttttgctttgtatctttttgctataataaatctgaactgttagtacatattcatgagtatgtactgtgagtatatatgctgagtgctatgagtcctcctagcaaatcatagaacttgggagtggtcctgggaacccacccctgacacaaggacttctcagagctggagagctttccaggtcatgcagattcaaggcagactgtgaggtatttgatagtcctactcgtgtgttctcatgtgcatcccatctttccaaaagtgcacacttgaaacagatgattttgagaagagctgcttctaccaacttgatcttggccacttgttgtattgttgtgcgttcttagtttttctacttttaccatttctggccagagctgtcacttttaaaaattactccrttgatgttgcctagcaagagccactcagctstttgtggggaattaaagtagattataggttgaggccagttgcacttactgtgctgcaaattggggactgatgatctagtcatcctcttcctttcttacacacttccttcctgtgtcttttccacatgcaaacttgaggtatggcttcctgtctttagtcatttcatatagtttggtttgtgctatctttggtcatagaaattgttcttctaaaacctctccagatcatccttcatttctgtgttggacatgcatcctccatggctggttttactttacaaggggtgctccccctgaaaacagcactggcaggatggccatgcacagttgattgctgtgacagaggggcttgctgatcctgtggctttatctctatctggtgtctgctatgagtagagaaacatgggagagattgagctgcaaagcaaagccagtttatccagtgctttacagttgtggtttaaaaaaaaatttacaaagcatggtggaataattctctcagatgagccatgcagagggaatccacttgatcagattggctatatggagttggaggatcaattatgtgactcagtaagtgcttattgcgtgtcttctaggtgccagaaacgtawtgcaaaacaaaatacacaaaaatacctcacttcagagagcttatattctagcaaaggagactggccatagacagtttacgtgtaatgtcaaggagtgagaaatcttatttagaaaacacacacacacacacaaaacataaagcaaggttaaaagagaaaattgcctgggaaagaggttgaaggtgtgtagtggactaaatgtttgtgtcctctccaaatacatatgttgagatcctaacccccaaggcgatggtgttaaatggtctggggcctttgggaggtgattaggttttgaggggagagccctcatgaatgagattattgcccttagaagaagacaccagagcttgttttttctctctgttcttgtctgtgaggatacaaggagaagatagctattagctaaccaggaagagggtcctcaccagacacggaatcttcccacatgttgatcttagaattttagtctccagaattatgagaaataaaagtctgtggtaatttgttatagcagcccagactaagacaaggtacgtttaggatggggaaggcctctgaaggagtgatgtttgaaccaatatataaatgaagtgagccactacctggaaaagcattcatgacaaggaacagcagggagagagtccaggacttgagaagttccttagcacgttcatagggcgaagtaaggtcagtgtggctggcgtgcagtgaatgagggcaagagacatatggactcaggttgagagccctgtaaggcaagttagggtcacttatttgatactgtgagaatatatttaagtgtgataacagctgctatgactacttgcttagtcagttttccctagaagcttttaaagtttgggccctgctagaatcttttgatgttttacatttggtgatcactcaagtggcgttaggtatagtgcttcgtctctccctttatatcggcagtcatagaatctggttcattctggaactttccgtgactgtttctctagaaggtgtccgtctcagattcattaactcagtggttctgtcaggcctggttggcatatatgattataccattttttttttgtttagagatgggcatttctaatttttaaaagggttgggcccactgataattttaaaataaaaggaaacatttctttatcttgcaaggcaaatgttgcctaatttagtgaatatcaatttagtgaatgtcatagcagtagtgtgtggttttcagattgcgtctgggtcctcagaactgagtgtacctcagggaaggtatttactgttaatagcaattggaattgagagacaggaaaacacattctgagacccaatgccttttactcagtgctgactctgcttcacatatagcatctcatttaatcctcgcaagtctctcctcttctggaggaggtcagtgaaggtcaaagaggagtggtttgattcgggtccctcagttcacaggtggaacaactctcttcaatccgacagggtgcattgggtaaaaggagaactgctttctgttgccgggtctgctgctaacggaaggtttaaacgtggggataaagccaggttctggtttctttctttttgaaattaggagctttggattttccttaaggtcttcaacttctgtgattttaatrcaattcaggtttattttctgctatccctcacctttgctctgccagtcattactaggtgtggtggtgttttgtttgtcttgtttgtttttcctgttaggatctaccttcatctgtgttctatgccatgggccacacctggtgttaacactccgagcaaggggtagctcttgtaaccagtggctgtgctgtagactctcaacgacatacagaggatctttatcaaagcgtgttatgtgacttgctgctcttgcagctctttgaaaccccctgcagttgagccacatacctgtgataagaataagcaggtactcagaaggccaggcttcaaggtggggtctccaaacagataacagatggaggtcatggaccttcacagatgtgtgcctggcatagggcaaatgcattgttgtcactgggaaaaatagctagcaagcatgcctccagggartgtgggtccttaacacatgaaaggcaccttcacacatgaaaggtagcctattctcatttcattacaattcattttgggtatcactgtgcacccttgcttctcttgcatgcttttataacatgtatatgataataagcattactactcagtgaatagaaaatacgaaaattgaaaatggatggtagattcattaaattggaaatgaatacattatcagtgggtacttgtttccaggcactaggctggttacttgtgctgtgattttagtatacgtatgcgagggaaataacatttaagcccacagatgttaagagtaagtgctttgctccgttccttttcttccctcttttacgtatgtgcctctgtattcttcctcccttccttttcttattcctcccccacttctttgctttatttttttatttttatttttttgagacagggtcaaactctgtcacctaggctggagtgtagtggtgcgatctgggttcactgcaacctctgcccaccaggctcaagtgatcctcccacctcagcctcctgagtagctggagctataggtatacaccaccatgcctggctaattttttgtatttttcgtagagatgagatttcaccatgttgcccaggctggtctcaaactcctgagctcaagcgatctacctgtctcggcctccgaaagtgcttccttgctttaaattgaagaaaagccaagctggaaaactatagattttgatagcagccaaaccccttgagtctgcagttggctgacaccatgatgtgtgatggctcccaggtctgcgactatggctttgctagcatgaaatgagaccatctcctctcctcatacagaagtgtgtggaggatgtgaaacagagtagggaggtaggagggctggaccacatcctaggcaggtaacttgccccctttgttcgttggcttcccagactcctcgtagttgttttaggtggatctagaaaagattgcctcatggagcactgcatgttcagtgtaaagatgtgtcacttttcttacagcctcaaatcttttgcctctgagtgaggaggcaaatggaggagagagaagttttattctaccttccagggtggctattctgcactgttttaggcatcatcaggtaaataaggcatccattgttctctgcggtttagccccatagacctgttaagtcatgggaagatctctgcactggcagtaaagtaactttttgttttcagtgtttttatttttattttcatgtttccaagtcttaatataaggtcttaacgtaggggctttttggagctgctgggtgattttgcctcacaaaccactaagactaagtattcggggtatgatgttcatatttctgagacaaatttagaaatacatacagtctaaccaaggatttttgttccaggtatataccactgcaggtcaagttctgtrtaaggggatttgtagttgtgaatgccaagggcttggttttatagaaggtaggtgtaaaaaatagaggttcctcttcaaagactttcctccccgtctaattaagaataaatagtaacttctcttagaagcaaaatttattcaaagacctgtgctaacattcttaaatatctgctagccgtaataaagaaatcaatgtactttatgttcttagctcccacaatttagcctaaatatttgcttataagtatgtttatactggtccaagcaagcattaggtcatagtctgttcctcttccttatttaaatgtgtttttacctttctcagcatttcacaagttacttcctctttcctttgttctcctctgcctttgcctcttttaaaatgttctaagttgctagccaatcaggacaaatacagaatgtgaggtcctgttccagccaatggaaactggacacagcagtaaggtggacgcgtcaacttataaatgaccctgcctcctttgttcggtgtactmtcgtggcaaaactgctggcaagtgtaccctttctgtagaaagtaaaaatggccttgctaaggaaattaaatttatgttcaagtgctatttctttattgcaccgaggaacaagcatttctaacagtaggttttagtatatagtttagatgttccttatgttgattgacatttgatggctcttcagtggttcgaagatgccagaaaagaacaatgagaatggccagaaaaatctagaaactatggtgaaagtacttacaacttgaatatagccataatagaactggattgtgctagaagtgactaaggttggcagtggaattgggagcttagtaggcccaatcaactgtgtggctttcttcacttaggcagggaaaatgtggtatcttaggatcctcttgcagtaatttccaaacataagagctgcgaaataagttataattggaaaaaaatcttcaatgatgttgaaaatatttttccctctggattagccttctcttttattctcagtcataattttagtagggagttttsttgtcactttaagggtattcattccatttcgacttgtcacccagattctcttcgaggatgacaagaacagccagtagtggctggcttgtggctcttctgtgctgttgctggctgcagccaaacaggaaagggctgttcggagyttctattggaaccatcaggaatactgtttggtcagctttgctacctgacaggaatggttttgggaagcttgaattataccaagttgcagtctgtttcagttcagcctcttgccttaatataacagatactcccctgtcttaatctaaacagtgcttaagggtggggagatgggttcggtggatttacagcattccttctgaaccctaagaatctgtggttttattatttgtagtgcaacccaaaaataactacaatttttatttgggaggtggaaattagaggtaaaattctttggaagggaagaggatttcatctaggagtgtttggcagcctcatgcaaacatgtttgttcttatttgaattttgactcttgaaatactgtgatcttggcggtttaggccaagaggtggggtaaagaggaggatgggaaacagactaaactcatggaatttcatgtagctgggtaggccaagtcgactctagtttagttaccatgttttctttgtggctgtgtcagrgaattggggatggacacatggaatttaaaaaataacacacaattttaaaagttattaccaccatataaaactagctggacctgggagtcagtttctggaatttatgggcattaaagaaatgccgaatattaaattacttggtttggtatcgagggagtggctgcctggctcttaacagtttttgtgaatttcctgttctttttatccttggcttcaagtttttattgatggaaggttaaatattctttttttttcctttgtagcatatgactaaacctrtggttcttttgcttcctctttttttccccttgtcttgtttttccctttcaccccaggaattaattatagtacttgaaagaaaaccactttccttagtcttataaagtacataagagacagtaaaaaatagaaaatctttttatacaactgaccttgtttctgcagacattgtaatctattccacttaacctctctttcttctgttattttactttgttaagatagacttgacatttgattaggaaaaaaaatatgcattcaaatgttatgagatatagaatccaaaaaagggaagattgcagaaattwaaaataaatgtaaaagattacaaggtaatacaatgaataagttcatactatgaaatgacacaactttgatgacatggaaaaattcctagacacaatctgtactgactcaaaatcatctgaaggtggggtggagtggctcatacctgtaattctagcactttgggaggcagaggcgggaggagtgcttgaaaccaagagtttaagatcagcctgggcaacacagtgagaccccattatctacaaaaaataaaattagctgggtgtggtgacacacacttgtggtcctagctacttgggaggctgaggtgggagaatcacttgagcccaggagattaagattgcagtgagccttgattgtgcccctacagtccagcttgggcaacagactgagacctggtctcaaaaaaaaaaaaaaaaaaaaatcatctgaatagctcaataacaaagaatttgaactaataattagaacttttcctacaaagaaaaacccatgctcagatggcttcactggtgaattcttttaggtatgttaagaggaaatgacactgattcttcacagattcttccatgaaatatagaaggagggaataccttgcaattcattctgccagtaacaccctgttaccaaagctagacaaagacatcacaagtgaacaacagaccatgaactcctataaacactgacacaaattcttaaaatattagaaccccaaatttggcaacatatgaaaagggttatatataatgaacaattggaatttattctagaaacacaaggttggtttaacattcagaaatctattaatataatactccataatagaacaaaggtcagaaatcatgttaccttaatataagcagaaaagcatttgagaaaatctgattcatgaaagcaattctcaacaaactaggaaaaacatacaggttaacatcatacttactagaaaagaactgtttaattttttttttctcctaagattaggaaaatggcaaggctgttcactcttgccacttctattcaataatatatttgttaactgttgaagttaagtgatgggtagaagggatttgttgtatcattctctgtatccttgtgtatgtttcaaatttttttctgataaaaattgaggaaaacaaatataggttaaaaaaataagtctactagatccttaagttttgttctgttttctgtttagctaaattgaggttctaaaaccagttattttcttttagagtatgaacgtgtatttctttgggttaatgttgaattatttgtataaataatagagaaaaatattatctctgtattattatttttgaaacaggatctcactctgtctcccaggctggagtgcaatagcgtactcttggctcactgccacctccgcctcctgggttcaagcaattctcctacctcagcctcccaagtagctgagattacaggcatatgctaccatacctggctcatttttttgtatttttagtagagacgatgtttcaccatgttggccagsctcgtcttgaactcccgacctcaagtgatctacctgcctcggcctcccaaagtactgggattacaagcgtgagccaccatgcctggcctatctctgtattatttatcaccaaataaaaattatggtgtttataaaaaatgtagagttagaacactatttcttttcataataagttatgtcacttatattttttccactcctaagaatgatcagcaaatcagaggagctgttagggcagttagacaccatgcggatcatattctgttgtaacaaatccttgtttatcataattcaacatcaactaaatatagttgtgaatttccagatgttggaaggtgttttcaataaatttggtactgcagatggtttgggtggtctcctggagtctcttttgattagatgtgatcagaagtatacttgagagcttagtctaggataggaattggagaagaggtagttcataatggtgatggttgagtgtgtttatgtaggcaggaaccatgggttgggattggggctggttgagtgttctgtatgaaagacgattccaggcaggaagcatgaaagcaatttaagactgtaccttccctctgaatgaaaaagkcaaaagaagaatggaagaagaaggaagtcacatttagaagataagaattcttctgctttcttgtgaaagttagtgtcccatttgagaataatattcttacctagatcttcccaattgtacttttccttcttgcccaaaaacacttgcccatcgtttcttcttcttccctagaatttatatctttccaagcgtcaataccactatcatcatctgtagtccacaaaatctctgtcaattctgtgagccagtgttattctggagcatacaaaagcagactgacacatggccrctgactttgtggaagttggtctcactggctttgcagtctttgtaggtatgtgcatttctgcacacaaacaaattccaatyagaggatggtcaaagcmaacaccagatttttagttttagattgttcagtatagactaaaaattttataggtgttcacaggcaccctggaagtacctgtgcgagctggagtactcttgtgaagtttcacagatagaggagagcttgagctaggcctgcaggtaaggtagggtttggaatgctaattgcaaccttcatcaagttgaataaattgaagtgagatttgtatttaaggttttgtagcttttttgttttttaaaatgcagtgtgtctgaatcaggatcttctttatttcagcaagatgaactacaagtgttggtaaaggtagttaaaatcccctcttctgatttcatagtggtagagcccaaacccagtatctaatatttatcccctgtcccctcttttattcctcatgaattttttcagattggatgtgtacagactccattcaaaaattttaaaaagytcccatttcaaagctggtttcctttaatcccatagtccatgtccaaaggcctcttgttgcagttctctcttcctgtagcaaacacccacccttggatcttccctggracacacaaaccttgctgctgcttaagaaattcctccctggctttccagttgacttgcactcaccttgaatataactctctgaatacctgtaagctcatatcatgaaattttgtcatatcattatagaaagctttagtgattactctttgatctgcagccctgttgcagaggttgctgttatattcatttctatgttctagtgagcagaacagaagtaaagtgaagattaattccttacactgttggttgttcagtataacttttgcaagaagcaaccattctctgacccttgggtttattagcactgcatgatgctggaaaataataaattcctgattacctttcagatttccctcatttagaccatcttctcttttcagtacttacactggcacttactgtgtaagacagagccaggtcctgcagataggctgaaaaatcaagatggcatgttgtaaatctgaagtcgggtgatttctgtcgaagcctacagacaggattaggaatgaaatcacagcctgccttctgctgaatgtcttgagggtgaattatttcctagtactagtgactctttctgcacatgtgcggttaaccttaatggagtaaaggctgttttttaaacctctcttcagctttgggcccaacactatacacaattaactagttcactgcaaataggagacacctaaatgcactcagtgacagagaagaacactttaccaacagtttgtacttaagtccaagattacartttccaagatgaagattaaactttagttttatgcacttttgtaaccaaactaaagagatggaccctttagcactgccagcccacaatgaaatgtaatattggaagtcactgaaggtgttatttgaggtgctttaggttgcatgtgagcttgttgtagagtaagttccagtgaaggtcgttggcaaagggttagttgttaaagattagcaaaggaaaattgtccttcatctgtgtgcttaagtcacagagaaagcacacatttaagcaacttagcttaattttcataccctgcacagcccagttcttaagtatacaacctgatgagttttaataaatgtatatatctataaaatcaccacaggcaagataaggaacatattcatcaccccagaatgttcccccatgcctctttccattcagtctgcatcccccataggcastctctactctgatttcaatcaccataggttaattttgcctgttcttgagcatcatcaaaatgaaatcttacagtatgaacatttttgcagagtccggcctctttttctcagcatagyrttttcaagattgatccatggtgctgcatatgtcaatagtttattctttttaaaaaatcgcagagcagtactttgttgtatgaacataccataattggtttatctgttttcctgataatgagcatgtgagtcatttccagttgtgagctgttatgaataatgctgctagagacacatgagcctgtctttttttctaagtagtagattctattgctctgaagttactcataacattcttttattattcttttaacatctataggaattatagtgatatccctctttcattcttaatattactcatttatgttttctttttcttgatccctcttgccagaggtttataaatcttattcatctttttaaagaacctacttttttttggttaatttttctctgtttaggattaaatcagagaggcagaactgccaagagaggcgtgtgtctattaagggatttgtcaaaggggtttgaccttacacagctctggaagctggtttaacattttctgtaacgctgttgcttttatgtctgatgatggagttggcatccacagggcaggcagctaggaagggaagataaacggtaactggaggagaataaggacgtgctggaacacatgagtatgagctggagctcataattacaaagcaacactcatgtcagttcgcttttggttttggcttgattttgcctccagccttggagtatggatattcctgcacaagctgggaccctttgtctcaaaatgaaagagacctgggggatgcaagtcttcactattccacttcctagataccaaaaaaattcttaaatagtaagaccaaagaactgtatagggtaggggttgacaaacttcttatgtaaagccggactttttatgtcagccaagtattaaatatttttagctttgcaaaccgtatggtctgtgatctgttgcagtgatttaactctgtcattgtactacaagagcaacactggacaatatgtaaatgattggcttgggcatattccaataagactttatttacaaaaacaggcagtgggccagatttggcttaagggctttagtttgccatcccttgttacagagattgtaatatattttcttatcacggtatagttagagttaatattatacatttcatgtttaatgcatattgattcaccatcctttgtactattgttgttcaatgtcttacatctataaaggccttaaatctcactatgccctaatatgatttttatatttagcagtcaattgtctgataaagaaatgaagagaaggaaaacactatagtgttttatatttagccccatattaatatttctgattctcttaatcccttctgtagttccaagttaccatctaatgtcctttccctttcaacctagagcttcttttattatttcttgccatacaggtctgctgggggtgaaatctttattcatttatcttaaaaaggctttttttggtaggggctggcatttttcaaagacataaatatagaattctgagctgacagtaagttttctctcagcatttaagaaatgctgtgtgtgtgtgtgtgtgtgtgtgtgtgtgtgtgtgtgtgtgtgtgtgtgtgtgttttccagcctccttcttctgacgagatgtcaggtgacattgccatctttgttcccttttatgtaatgtgtcttgtttttctctgtctgctttcaacattttctctttctcatttgcttttagcagtttgattataataaatgtgattgtctttatcttgtggttcactgaattgctggatctgaagttaatgttcctcaacatatttgggaagttgtcagccattatttcttcgaatattttttgtctcttttctcttttctacctctgggcatccgtttacacaaaggttcgcctacatgatgttctccacaggtcatggagactctatgtgttttatttgtcttagtcttgaatgtctctgtttttaggttaagtaatttccttttttgtttttcaaatttactgatcttttattcactgatgaccgtttttcctttgtctttaatcttatttataataaccgctttaaattctttgttagttctccaacagttgcgtcatcttgtttttgttgactgtttttcttgccttgttcacgttttcctgtttctccacatgtttaataattctttattatgtattggacatgacaaggatatgctatagagtgtctgggttcggtaaacttcctctgaagagtactgattttttttctagtaggcagttaaattactgacttactgccttgaacttaagaagacttgcttttatgatttgttagggtgtgtctgtttccatttttttccctagtcttggaccatctgaagtcctgggcctgatgtgaggcccttctggggtttcatggaaagcctgaaatgttgaccctttgactttttggggtttaaactgtggctgccctgcagtgagcagcagctgaagtcttgtgaatactttgaacttttaytggagcctccctcacaaatgcttagttttagggtcgctcaagaagtttaaggtagtttatatacagactttggggttctcctctttgggctccctctttytgggaatatgctaccttaatttttcactactatgcaaaacttcattctatgaaacctcaagccagtgagactgtagccttttgtttgctaccttccagacttgatagtcccctctggggcacagccatataaatgtgagtcttattcagtgtagtttccagaaagaatttaaggatcaaatcccttctagtttctgctcactttccctcactctttagtgtcatattgtaagtgttatctgtgggaagattgttccaatacaagcttctctgctattgccaatgcatagtttctcwgctttgtttttaaagaatcctaggttaactgttatgtggatcttacacaggtagtgtagtttagcagcgtgctctgggctgggaagctgtctgaattatctgttaccacagtgctgccttccccctggttttggtatgcatgctagctcttttctgttaggtacaatatacaataaccaccatttctaggttggcaaggaccgtatgtatttaacagttgctctcctatccggatgccatggctggagggtaagcaagggactgcactttattctggatactgggatggtgaatgggttttcaggtagtaatcccaccacctgaggatcagtgccttctaagagctaactcaaaaaccaaatattcatctgggaacagactacttgctgaaacgaacaaattcccaggcagttgaaarcctttgtgtttcctactgggaataacctgcattcacaaattcattagccttttatgtggagttgatgaatagcattccaggattataagaatacttgtaacatcccagaatatgcacattagtctcttaactttacaagcagagtattggtatccaaatttacatggtcttaacacaaagcatgttcttttctacatgaaggaatacctgctaagggccgggagaagttctaaggaattaagttgtaagatagcctgattttttgtkttttaacatgtcttgctatgttgcccaggctggtctcaacctactgggcacaagcagtcttcctgcctcagccttctcagtaggtgggactgtaggcatgcactactgcacctggcacaatctggtttttaagaggcatcctagccaaggacattacctagcaggcttggcatgtatattttatgccaatggcttgtaggtttcatatcactctggatcagtcacagtagacttacaatttaaatagcttttagcctttcttcaaaccrtacccaagaatttgttgtgcttgtgggtgtttgaaatattctgsstttcagcttcttttatacattctctctgtcctactttctctaggaccaaaaccttattatcaaggtgtcatctcaattctgcattatcttgcaatttatttttctgtttaaaaaagtaaggtaagagaccacaaccaagcaaccaaaacaaaatgaaaacctcagtttatgcgagacggtgaaaacaaaaatttttcttgatctcctgttaagagaatagtcgaagcacttccgccttgcctctagatgtctggctggccagatagaatccctgtttctaaccaacagctataagacgcttgtgacaagtgattcagaaagtgggcattgtgtgatatgaagagcacacacctattttgggcaatttatactatcttaaaacagcccaaggatatagctagccttctctcagttattgattccatatttcttttcttcttcagttgcaaaaaggaaatacaaatatacacacataaactacatgtatggctttgcttttcatttttaacaaaatccaaactcaagacacctttgacagtttgataagaacaggcagaaatctatgaactgtgcttaacatggaaccctgttttagaagaaaaatcaaacctctctttgagaggttgaagtgagatatgggtgctctgtgttgcaagggcatgtcactgttacagtaagttatctgtgtaacaccctttccttcttctagtaaactgcatgtgagaagaggggacttggcaaaagcttggcactattttgtttattggaaaaggagaatcgttataaatatcaccttaggcccccaactcgagaatataatacagttttgcaagtatcttgaatttttaatgtctcccacctatttctcagtatattttcttaaatcaaaattgacagctgaggttgtctcagtatgttagcattatatcttattcttttaaatgtatgtatagaaacttttttttctgggaatatatctgtataactttttgtttgttttgatgtataaaactagcattctcctagtttatttcctattaggcccatttgttgtaactaagtacatatatgatacccacgtggaatatttcatatcctttacatcattacttaaaatactaaggaacattttgttgcagaagaaatgatagcaaaaattaaatataaacttacagaaaatggtatttacatagaaatgaatacatgcagagttttgcattaaaaagcactctaattatccaaactatattacaaactcagttttgtcttccagtctcaaagctgctagaatatatatagcatacactgttttgctattatattcattgaaaaagatctaaagcatttttgtcgttgactatacctcataccccaccaagcattgtgacaaaattaattagggacggacaagacaggcacagagaatatacaataggaygagtatattgtacaaatagattaaatgatctaatgagagctagtgtgtgatgtttcagtgtggtgcaggcaatctctccttctcatggctttatctttttcaaaatcccatattttacttcggaagtttgtcctgagggtgaatgaggctataaatgagtgccaggtacagtacctggagccagggtgactcagatgttagaaggctttgctgactctgttttttgagtgaagaaactcctgaaggttaagtaacctgctcagcttatgtgattaataaaaggcagagagataatcccagctgagatctcttacaagacaaagcccctgccttttccagggcatagtcatgacattttctacctttttcattgctgaggttcagtgtggtcaaggactttaaaagaccgggacatgcgggtgctactctctgctgatacatttcagtgtcagttccaggagcaggcctcttcctaatgaggaggcatcttgcatggtggccagatagtatcttacgagagggttgatctactgtttggagatttagagaacacagatttttatagctttgtaactttagaggccgatgggatgayggcattttggaatatgtttaattaattttcattaatttaatgaaaatggatgttaaagagactatttaagaaaagcattagaagctgctgttaatcaaagaagggggcttgagcattcttaatttgttytgaagaccttgtgtcagaaaaacacccctgacttccttactaatgaaagacagttttcaactccggggccatttacaatgttagatataaactctattcaactgtaaagattttatacagtaatatcttttaaattayacatggtcacatttttatccacaaaatgtgactttcattccccttttcctctggatgtcacctttttttcaaaatgttgtttctccactcaaagamcattagttacttcccctggccattgtactgaaactccgcaagtgttttcagttgccttccggtttcctgctgtgataacagtgataaattatgttctgaggctggaattcatgattctgtggcaggccgtgtcagcatacctttccaaccgtatttcttactaccctaccctgagtcccctgctttaaccaaattgtcccgctctgctctcctgtgccctctcagacagagatgattgattggttatgcctacccactgtgggtagatttgctgtcctggtaaaacactctaattgttgaaacataacataaaatccattttccatctctggccgttccttttcctcagtgttatttcaccttttattctattgattcccagctgtggctgccttttagaatcacttgaggttgggagagcattaaaaaagggggtagcagaaccactgcctggggccactcaaataagaatgcctggagggtgaggcacattcttaaaaggtccccaagaaatgtttaaatgtgcagatagggctaggaatggctaacttgtgaccttrgccaagttacttaatctgsctgggcctcagtgtcttctgtagtagaatgaaggataatagtacttattattgtgaggctcaatcgagtaatcggtgtacataagatacagtggtgttactagtagatgctcagtctgttggctaccatcattattacgctgttcttcagtgtactcatctttccttttctctcctgtctacttctactttagagctcaactcaaatcccatttttccagtggttacttaaggtttaaactaagttgctgcaacaaagagacccaaaaattcagggttgaaatgagacagaggatggtttctcttgtcacacgataatccagtagtgagcagtccagaccaatagaatggctcttctctgcactgacattcagggctccacattcttcccattttgctggctcatcgcatgtcccatctactagcccatggaaagtgtatatggcattgggctgttaattgccttttctggtgagcaagttttgggttctaagcatatttaaggctccctcaaggtgaataatgttttgtgtttctctttgcttcccaggaaggtactgaaatcatgacaaaygctctaatttaggtgcagtatttgttgaatgagtcaatgtcagaacttttctggtttttgtaacagctttattgagataatttacataccacacatttcacatatttaaagtgtttgatttgaggcttttagggccgagtatggtggcttatgcctgtaatcccagcactttggaaggctgagatgggaggatggcttgagctcaagagtttgagaccagcctgggcaacatagcaagacctcatctctacaaaaaatgaaaataattagttcgatgtggctttcagtatattcagttgtgcaaccaccacaatagtcagtgttagaatattttcatcacctcaaaaagaaacaccatatcacctctcctccctttcctcaaccctaaacaaccacgaattcactctctctctagatttgcctataggttctgaacatttcatgtaaatggaatctcatatgtggcctgtgtgactggttgctttcatctagcataatgttttcaaggttcatctgtgaagcatggattagcacctcattccttttaatggctgaataatattccattttatggatataccatatttggtctgttaattggatgatgggtgtttgtattgtttccaaattttggctgttatgaataaggctattatgaatgtttacatacaaatttttgtgtagttatgtttttattctttcatagtgtaaaccaaggagtagaattgttgactcagatgataagtctgtttaactttttaaggactgctagactgttttccaaagcagctacactattttatatttctactagttgagggttctactttctttacatccttggcaacacttgttattgtctgaatttttattataactattttagttgatgtgaagtcgtacctcattgygctcttgatttccatttccctgatgactaatgatgataagctctgcctacttttgtcagtagcaattatttaaccccagctgtgttcttcctatcatgtgtgtgctcctaggtgtgtgrataaccttttccctggctgaccatttctagtagcagcaccgtggggcttatcagaatggagggttggkgtatatatgatgttgtggctgtgtgtatgtatagcattcttatataactgtttttcatactgagaatctcagtcctaggtcccctttttaatactaatttaccaaaaaaaggaaaaatcttaatgctggcttaacagcttaattcgacaattctgccataaaatagattaaataaatgacagagggtatgacaaaaggaggtatgaagaatctggagttatttggctgaattgtgatttgaaattttatgacattatcttggcagtgtgttttcatagtcatcacaactttattctttttatacattagttctattcttgaaaagctatacatagagaacccatatatatacactgaatttgattttcttgttgagttccattatgtccatagtatttgtacacaggcagtactgtagcttctggtttttatacagcaagtccatgaggcccttggaggtgctycttcaagagggaataagaatttgttaattgtgttcactcttgaaatttcccatgcagaacatgaagatgatgatgtgcatttcaacagtgttgtggaaataatcttgactcagaaggcaaatgcctcgttgaacatgcagagtgctttgcatatggaaggtgctagtggattttgtttaatccataaatgaggaaggcacttcatctcactaggccttactgttatgaatcaggaaaactagagggttgaatgktgtggtttcagaagtcccttgcagctctaaaattattttatgcaatgatgattctattttcaacttagattaaaaaacaaaacaaaaatgatatataaacaagtattttcaaagatcccagtatacacctctgggggtccatgagtgagtcttgcctgtttcccatgtcttgacttctcaattgctttgttggggagggaacttcctattgctgtggggccctggttctggaattcatgtacatgacttagttacagaaatcaaattactttttttatggtgcaaaagtaaagcattcctaaatgaatatttgccaagctgagtgactggtgaggtcattttcaatgggagactatattccatcatggctggcttcagtctgatttattgccatccactcctgaagccaagccagctgatggaggtgctggcaagagctgtgtctccaagcccattgtggagattgagtcggttcccagccatggctgagcagccaggccagtggcacgctcatttggctgcactttgcaggggccatctgataagcatggccacatgttcatatcaggtgtgccaagagaaatgctaccttgtctgacacaaaatagaattgctggagaactttatcttttgagagaaaatatctttagagtgtcattgccctgaatggagcccttgctcgtgaagttgataatcttagggtcggcaaaacaactgggtaaggagattgaatcagtttcctgtaacttcctggggtcaacagatactcatgttctttgaggtttcwgagagtttttataaacctactttttcttctatttttttctttcctttttttaacctttaaaatggcaatggcgatggatttagatgcccttaatctatcagatgcctgtccagaactagataaaaagttaatggacctgtgttctacaggttgttaaaaacaagtgtcatctcaaacaacacctgtcatctttgctatatagaattagtgtatggaaaagtgagccttaataaaggctcacttcctaatatggtcagccattgctctgaaagaactgtcttctgtgtgagctcgcatgcaaactcctgtctctctctctctcttgcatccactctcctccattccacttcctcactttatcatcctcgcctaggaacaggtagttgagattcttacacatggtaccacctttaagcattggcagaagtgagattagcccctgacttccagcctctttgtttttgagattctttttgtaaccatatttccagatctcctttgttcagcagtgaggagtggttattaaaaactttgtttgtagtaagtgaatgttttatgatgccgcgtagttgatagttggtgatacttaaaaagaaatggacgatagcatctttatatacgtataaatattgatcctaggcaattagaagatgcaagtagccttgtgtgacacccaargcacctagcatctgatttatacaagcagtgggacagttaacaaatgattcattaagattttctccaggccgggtacagtggcttatgcctgtaatcccagcactttgggaggctgtggcagatggatcgattgaggccaggagttcgagaccagcctggccaacatggcgaaaccacatttctactaaaaatgcaaaaactaaccagtcacaatggcacacacctgtagttccagctacttgggaggctgatgcaggagaattgcttgaacctgggaggctgaggttgtgccactgcactccaacctaggtgacagagccagactttgtctcaaaacaaaaaacaaaacaacaaaaaaaaatctctcatacaaccataaacctctcttttttgaataccagtaagatgtgactgtcagtaattcacatgggggctaggccatgtcccttctcccagcatcaggaatgacttgtctcccactactgcagcttcctgctgttttcctcagctgtgtggcatgtgcagtccagaactcggactccttgggtcagtgactccaagtaaggctctcccactgctttttatctgtggcactttctttcctcttcagttctctggaacttgggcactccatttcttcattgcatttgttccttccgttattaaacaagatggggtctccagtgtgctgggcatatatcctgggagtaccgacgggtagaggaggcttcgttgccgggtacttcattcactgttgtgtgtggtttcccttcctcccacgtgtgccagcccccagaaggcagggctgagtcttacaaggatgcagtgttggcatttcagcacgtggcaggcagcagatgcccagtgaaggtgggctaaattaggaggtcagtgctgaggattttaaaggctttccttttcagactgtcagatgaggtaaccatcttccttttttctaaaacgggataatgtatgtgatgtatcaaggcaagttatcccccatccatttcttttcctgtcctgtattacgctatttctattctcaccgttcctttgagaccgccgtaccaacttctcctgccctgactctcccctttttccttccttgctctgaggccacagacagcaagaaataaacacacacacacacacacacacacacacacacacacacacacacacacacacacatatctgtctggtttcatatttctttgtccctttcgcttcttaatatgaatgtgaaatgccattgtttccctctgtacacgtctctctcgatacgtgtgtgtctgttgggactgtcagggagaatctgtctccacgcctcacaggaacacccccgctgcgtgtatttgtgacatctcgtgctgcttctgctcctgcagtgtgtatgttcctcctgaatcttaagcatttttgatggcaggaaaagtgtttgttcacttagattaaacccatattcgaacacccactacatcgtatgggcacaagtgactgataaagcaacagaatttttacacctgtgtaatctgccttctgtgtagatacctggttgccagtgccataggatcatacagaggtgaagttttgggggaaagatgttgcaacctgggctggtgtaagggtaacggattaaaccgaatcctaaacagagctgagcttcattgcttacacttaaaatttttattttcccttgccctttcaacatttaaaaaaaatggcatggggaaagcttgggataaacagtaggcagagctttcaagttacatatcttggcaggatctttcttcttttttctttttatgccctcactttttattttatttcaacttgtatgacatggactctttataataaaagtttgttacatgagtaaactatgtgatgctgaggcttgaggtcccgtggataccgtcacccaggctataagcatagtacccacctccctcttttgaagagagcttgtgtatagtaagctcagtttcctctggaaagcagtaactttaaccttttttggctcaaagttttgtttcttaaccaaacttaaatgagagacatttccacaggtaggaaggtcctccatggacaaaaactgataaaaatgtttatagaattttggtcatttgatagaaacaaaatgaggagccatcctctgaaaaggagctgaaagtccttatgagctatggtgtgatggaaagtcttggtcaggttattcccggtcaggtttgggagcagttctgccccatgctgggaaggctgggactcccagtttctcccagtcacagattccctctacctgagaaccttgagcactcttaagccaatgcctctggaagccccttatctattcatacccatcactgtgtaactaaataaaggagagaaaattcgtgtataagaacatggagttgcagaggagactgtcgaattagctgacaaaccaccagtttgargaagaggaaaggccctggcctggtgggagtctctgctcagtctagttctccctgagcccaggagtcaggcccrttgggcagaggggaacatgcctatgtttattcagtcagatggcacttagtgtctggagatccagcaggaagacgtaaccttcctataggttcctcatgtgctaggaggggagatggactgccataaaggaataacgtgatcactctctgcagtaggagagacatgagcaggaggccagggaagcccagaggaggacaggattcctaacaaaatcctgactaggcttgggaaggaagaactaaggactgttgttttagctgaagaaagaggaaggggctttaactgggcagaggaagagtggtggcctggaaggactgaggagaaggacgttccagggagaggaaggcccgcmgggagccttgaaagaagtcagtccagcaggctttggcagaaacgaggggccttgctttgggaatctcctagcatagcaacaggggggtctgtgcctgattctgtaaataacattttattggaacacagcccatccattcgttyagctgttatctgtggctgctttttcatgacarcagcagagttgagtagctgagaaagggaccttgtggctcacagagccttaaatatttactctctgtttctttacaaaaaaagtttgctgacccttaactttattctttgaaattcttaatgaatggacccacactgtcagccctggggcgttgcttgcaggccttcatgcacctgttagtttattttctcattcagtgatcctgcttcaccctgccctaccacaccaccatgtcagtagcctctagatggcagtgaatatttcaggagtagaatagtatctgtggtgtaaagggggtggcatttccccaccaagtaccccctaaaatgtctgattaccaaccccaggctctcatagactgtgcctaattttgtggaacctctgctgctgctcatttgcttggccaaaaccccccatcatgccaagtaagcattgacaagcaaaatcagaatgaaaaatagtgataggaataatggtcattgcaaaatactattctttggtgaggcattccatttgtttagggcttctggagctggcagctagaaggagagccccacctcaagtctgcatctatttcaaaaacacagaatgcttttccagaagtgtctgtgcatttgaaatgctgctttcccagatatagcaagtaaaagttgtgtggaattacatagcaaatgccaacttttaagcacctgctgtggtccgtggtatctgccattgggcctgccaggccagcctcttgatggttagtaagagctggatgaaatagaggcggagtcattcccattttacagatcatgcaacaggggctctgacaagccaagtaacctccattttaactagtaagagacccatgagaaatagggtatttatttttatgctctagttattcttagcaggtagagggcttgttgaaatacttgaatcaagaggtcaagaattttggtgacasactatcaaaataactggttttcaaggggcaggtaaaatcctccttagcactaacttctgtctcagtcccagcagccactgagttatcatttcaatacccctgtgaaataatactgcagtttggaatctaatttttgattaatgctttctttagaaaactatcggcagtaggtaatgatattttccagacatttctggaaaatatagtagctctgaaaagagaagcatataggtttagggttgtcttgttttccgactaaaatggtcattcctacataacagtgtgatcataatcttcccctccataacattattctgccgtgttcttagggtaaagatcagggtacttattgtggcatttgaagcctttcctgttgttgcatctcctgtctgtcctgagtacctcacacttctttctgtttgagaccacctcagttccttgaacggcatcgttagattgtccctttggctggctcactcctactttgtcttcacatcttggctaagatgtcactggatgcaggaggccttcttggagctttggagagtgggttgggtatcttgccttgcccagccctgccataatgcctgttatactgttgttacattgttcattgttcatttatttgtatgttctccaccattagaccgtaagcttcatttaattttttttaaatcgacataattacacatatttatagggcacttagtgatatgatgttgtgatacataaaatgtacggtgatcagattagggtaattagcatattcataatctcaaacatttctcatttctttatagctagacaggaggaataagctctggtgttctatggcactgtaggatgactctagttcacaataatacatggttttaaatagctaggaggagcatattgaatgtttctatcagaaagaaatgacccttagcttctcaaaggcatttgttttcgttttgaccctacagttacaaggaataggaacccattcaagctagctaatataaaaggagtttattgtgaggaagtatttaaaacaataaggagaactttatggaaatctaaggactgggtctgtaagaagctgtatcccatggatgcagggcaggagttccttaggatggtgtagatacgtctcatggctctctgtgcaccagctctattcacacctctctggcctgttggctttctcagttcatgcagttgtcttcacgaggtctgttcatggccccagcttgcccacatagcctagaatgtccctaccagtgctggaggaccctcctaatcacatggctttatttcctgctccctgcttgtttggtttcttagtttccctattgctgatttctaagtaagcgctctggttggcttggctcacttttttaagccgggccacacatgttgtcataggtctctggccagcctgtagttgggctgtcctcaggtcagtcatcactctggaccagttagatatattggagctggaggggctccatgtatcagagcatggctgccaacagagacctttcttttttggtttctctccctacctcttggcttacaagaatgttaggcttgtgttttatagatctcattgtatcctttgttgtttttcattcttcacagatatcattaacggagctcaagaaaaatgtgtattgcctcctatggacggctaccctcactgtgagggaaagatcaaggtaaggcagaggcaagcatcatccccaatctgcacaaacaccccttctttttcccttctcttccttttcctcctcagtgacacaaatgggtgagtgagcccttgacatggatcatttatggggtgcctccatcctgccggctttgtctgtggctatgacaaccctgctatgcctrtgtcagccatgtggggttggtcaacartggctctcactggtcagcatgagagagcctgggccatttcaggcacctgctgagtctttgaagctgacttcccctctctgtttcccagcctccagcaagtgatccttgaaggaccaatgacaaggaactgctgttatttagtgtccaactccccaccatctcagtccccaggctcctgctctgaagcctccagactgtggtttaagtgtcacatttgtatttgtggttgagtactgagagacrcttggctgctattttacttggctgcttttttttccagaaatcctatttgtatggcctgcccctggggagaccactccctgctcagtagttttcagagaacagtgtccattcagggatgtagttaggacagtgggaccaaccccagaagcatttgggtggtatccatgtgggccgtccgtcaacgctcgtgcgtgccctccttcacgcactgtatttcaggtaccatgctgtgggctgttggaactggagttcctggagggggtgtagatatcagagtcccattaggcacttgatcttgataaaaatccctaagccacyrcctctcctgggctttattgcctgctgtaccacgaccttactctccactctaagcgcttctgctgaggcctaacgtaagccagtgtcttcctgttaatcgtccaagkaggtgagctgcacacctggctatcttgacctcggctcagtgacyctgtcactcagttctttaggscacagcttgagccattcactccatcttcaccattctatcctcgccttccctgtcagcagatgtggagggcctgtgaatgggctgctcagagatgttcttcttgtttcagtggatgaaagacatgtggcgttcagatccctgctacgcagactatggagtggatggatccacctgctctttttttatttacctcagtgaggtgagtagctttctgtggctcctsggggtagatgtgactggttggactgttctgtagctgagtctgaaatttgaaaagcttgaaaacgtgtggtatttttatgtggaggacctatggttccgtccttcattactctccctacctctccaggaatgatgtttttcttttctccttgagggaaaaataagcggagttagttagctatttcctttttttctagcttttctttaaattgtagtaaaatagacrtgagatttgccatcttaaccattttcaaatgtgtatagttcagtggcattaagtatattcacatcattgtgcaaccatcacyactgtccctctctagaattccttgtatcttgcaaaactgaacctctagactcattaaacactaactcccccttaagaccctgctttcagttattttggaaatatacccagaagtgaaattgatggatcatatggtaactgtattgttaattttggggggaattgccataccattttgtaaagcagctgccccattttataccaacagtgtgcaagcattttaatgtcttcatattctcacctacacttgttattttctggttttgttttttgaataatacaaattatttagagaaaggaggatcattcagcttgggttaggtataaagagagtcaatatcaggaaatctcctgggtttgtcaagaagagatgccacatgatcwgaatcttgagaaaaaaaaatgttataagtaagttaggtaaatgaaagacaaaagtgtattcaaggcagagaaacaacatagggaaagttatggtatcagttgcacagtgggagtgatgggacaatggacataggcaggggctaccacttgggaagtatggratactctaccaaaacctgggaatgtgggtagaccttctggttgctgataggctttatcttcaggtcctctatgccatcaacatactcatccatgctgtggtggaattcaatgtagctgaagctcctgctctctgtgtagctatttttggaattctcccagtgacacttgagtacattgggtgcattctgggtccgtacatatgcatgtctatagcagtcatcccagttgtcattagcatgtgtatgctcaatttggtaacctgagatttagatgaacatgtgagagctcttatcttttagagcacttctttttctctcatgaggacatcacatctgtactcttgaacgtgggtagtgatgttttatgagttcccaccagtagatgttcttcctgtgtacaagcagcctgcataggatcaaagcagggccaagagcaggctccagatctttagagaggttgccatctcagtcaccagagccaccctattcagattcagtgtttgagtcactgcttgtagaggkatcagtgtgtggatctgaatagcagagtctatgtcctcctcctccttttaaagaccaggaagcatttactggtttattataacagaaacaactcagaaacagccagagggaagagatgcgtaaggctaggtttgggagggaagtaactaaaagwtagttacrtttacsttccttttttccctaaatctgagcatcattttcatttgtacccttgaatttaaatagcagcttttgtatttttttttttaacggttgcagagaactttatgggccacttgaattttttacagactttaaggatatccatttcacctagaacctcttgggaatcaaaaccggctggcttcccctttatggactgggggaggaaggggttggagcagagtaggcagctttggggtcttgtgaaacaggttctggccaattctgaggtcatgcctccacagaccctctgctgccctttctttttattctgtcccccgtttttgtttgctgttgctgttgttatttgaccaataataacagctggtgatgccatgcaggaaggagaacaccttcatttttgaggctaaataaaatattcttgccatagttttccttttgtgggattcagatgcctctcttttctttgccatagggtgatggggatagaggccaaacagtattgctaatagggcatgtggccctgattctgtggggtttgcccctctctcagactattacttcttttgcctgggtgcattcaagttacactttttgggggttccaaccgggctccatgattttttgggggaagggggacaaggttgttccattgccatcatgaaaaccccagagctaacgatagttaaaatacctcttggaaatgaacagctctgagagttgggtgtgtgaggctcctcattagcaggctgctggcaaattgacttgatagcatttatatgagtttctggcttccggcttgggtggcttgtggcctgccttctcatttccttctccagaggagtaaagcctggggccatgcgtgaaccttcactctagttgaaaagtcaattagaagtacctctcctgccctgaggaaaaggttcctcatttagtttaattttcaaaagttttattcccctttctacttgaaagaatttagccagagtctgaccaagctccatgattgacaagctgggctaatttcatgccttcctaagcctttgcatgttggggtatgctgctgaggcagaggattttacattcccatacttacatctccttggaaggcatggagagtgatccaaatggaagagactgcagttatttgtgacttctttccctccctttgtcacacttcacccctgctcccagtgaagtatatggctaagctgagagaaaagtgaggttctggggaagggaagtagagaggaatacgggatgaagagacatgatggatcacatatcacttgctatctgaggctgagtatttcattttggaacgagcaactacgttttctcttcctgaggtgtgaaatacgcttcattagctcataccactctcttcttatgcagatatcgggtggtctttttgttgcttggctgaattctgttcagtgagcagttattgaattcattgtcaacaattaatgaaaacacattttcttgacaccacgttatgtgttaatcattgtaaaagcaacaggaagaaaggatgcaggtaactgaaccaggagaatgggtggagataactagggaccccttcttacaagttttaatctgaatataaccctgaacctcagggcttttctatgttatcatagcattgtaataagtacyctgtgagagttgaaggagaatgtcaccaatatggtcccttcaataggaatamtatcttagagtcacacctgacatcagcttctgtttctgctgctttctcagctctatgaggtcacttaaccttttgtgcctaggattcttcctttatgaaataataggaatgtacttagagtacaacccggcagataaaagacactcaataagcataactgacacttccgtggttttaaatgttgtgatctttttggaatagttgtggggtgtcactttgccttggacattatatgtgggaacattgttccattttagaattagaatcaatttctggttctcatttaccagtgtaatgcaattttagatcctttgacttctggtartatagaaattcagctgtttcccttaatgcctatttttaaattgacaacgtttgtatgtattcatggtatacamcttggtgttttgatatgggtctgcattgtggaatggctaaatcaagctaattaacrtgtgcattacttcacatacatatttatttgtggtgagagtattttcccttgattggtcatttctggacatgatacttgggtttgcactggaattagctgcacgtrtggacccagtgcaccctaccattgttaatgtgagattagtagagatgttttgtaaaaccgattaattcctttttagtatttttaaaatcctggacaatatctgtggctttgtaggagctgttggttcacttgtgtggttttattctttcctgctgtcttgaaactttccttattctgttatttaagttaactctgaaacctgcgtttttatttcctgtatcatctaggtttctcttgcaactggggagatgattgagagagacatcttcatttgagttgttaatgtgatcaacacatgcaccagtgacttttattctattcctaatccttattgaaagagccagttcttgttttgatctatgtttaacatcagagctttaacagatgccaaaaggacatgaagtaaaatgtctcttgtatagtcagtcactagtggaattggagcatttagattcagacctgtcttaagagatggtactcttccttcatttttctttcttagggttgtctcagttcaccagcttccgctgagttatgggattagaaacttctgttagtactttcaccctcaccaacttgtagtctatggatcttttttggttaaatcccaggaagmaaagccatcaatatttttccttaaaatacccccacagctgtttgttatatgtctgacgctgtactagagatggtagagataaaagctgagtggttgcctttctttagaggtgggactttggggcagacaagagaagaatgaaagactattgatgctccactgtaccagacacctcaaatacagaataaccccattttatttaagtgacttcagcatctgaggattttaatatccacaggggtcttgaaaccagtccccaacagatactgtgggtcagctatacacaatcttatttaaacctcttgccaactctaaagagtaatggagagccaagtcatagatagctcagagaggtcaagtcgcttatccccaaagtcctgcactttttgttcctgctgtctcctttatgatgaaggaaaactgatcttaggtagctaacttgcagccattgactttgcattcagttgtatggttaaatccacttgtgatgggaaaatggctctaatttagctaacttgaatgaatagatcttcattgctagttgtctaatactccataatttcgataccctacgcctccaaaaaaacacaaactctcttgctgccataactcatgaaaaccaggtgtcagccattccaagtggtaggaatgagcaaatgattcattaggcagccttgtatttccagaacatcaggcagttcattttctgtatctgttttcgtgagccatgtaactactcccattacagagacagggccctataaagtaattactctgaatgtcattgtttcaggtatattaacttaaccatctgcagagccttttactgctatcagcttttacaaaatttagaatgaatttcttcatctctgttgatattatgttgatagatgatactgatgtatttgacactggcacttttttttctttttaaacagttgttacagaacctaggaagcatcatacctttccagagttcctaatttgtttatgcttttcttgtatgcacttctgttgccattgcaagtagagttgctctgaaataatcaaattgcccagtgattgattgctagatcttaggatgtgtgcaagctattgcttcaaatgccartttggactagatgcatgagagtgtgtctatgactctttcacaaaggagcaaaagaagcagtttcatgccttacttgtcaatctagttcttatatttcataaacaacagacgtaaaggtctttgcttctttctgttctcccttggcagtatgtaaaactaatattggctgagcatgtaattaaccttgagtttaaattcagcatacttaatcccttgattaatgctaagattaatgcccaacaggaaaggttgaaagcttaaatgtttgtgaatgcgagcatgaaatgaaatcctaataaccagtacaatgatttggatttatgagctgtgttggctgctaaagataacttggaaatggtgttgcacagactaatttgtcaaagtgggcagtgataaagaatagactgcttaggttacaggacaaaacctgaatgtaaaaacaactaacgttttggggtgggtcagggagtactttaaaaatatcaccggattgttgcccgagaataccaacacacacccttcaaatgttcagccatttgaaatgggaaattccttttcctcaagataatatttctggrcagtaaaggaggtggcagagatttatgatcatgttcttttcaccttctctgttcagcctttattggtatctttttcatctgtatatatttgttgctcttactacctgagttctaagacatccttagtaaaagaatttaaaaaaaaaaaaatcctgagtttacagaacagtatttgttagtcagcctaactgatctgttagtttctccctttagcccctcacccactaaagttcttagcaacacttcctgtttatgaatgttatataccacaacatttatatttagacttcttgttctggcctccactctacaaaamtcagaagggcaaaggacaagacttgccaaaacccaaatcaacacttctttgactgcttcttggaacacatgtggcaggatggggcttcaatgctgtcatctccaatttgttttttatacacatttaaatatcgtctcatgtaatttctattgtatgaccctaaaaatacttttaaaattatgttttaaactttttaatatgcaaaatttccagcatgtactacaaaagagtttaacaaactcctgtgtgcccgtgatccatattcaacaattgtcaatccatagccggtctcatttcatttataacctcctctgcttcattattttaggacaaatctcaagcatcatatcatctgtttcaatgtgtatctctaaaagagacttttaaaacatactgtacaactattctcattataactgctaatactatttcacacctgaaaattaacataattccttcacatcagattagtattcacattttcaggccattgtataaattaaagtttatttatttgaactgggtttccagtaaggaccctaaattgcaattgttgatgtctcctaaatctctcttcattttaggttctcttccgtctcttacttttcctccttctaattttttgttagagaaactgcttcattgccttagagtttgtcttactctgaattttggttacagcccatgttgttgcataacctggctctttgcccccttgtatttccagtaaagtgatagctagctctgaggtttgatcagaatagtgcctaatattgtttgtgcaagttatttcatggataatggtattatatacttgagttgggaggcacataatgcctgatttctctttctctctctctctctctcttttttttttttttttgatgttagcaatcattgatcagtgcccaggttcattaattcattaaaggtaccttcttaatatatcaggaatacttctgtgcagagatgtgactcttcatcaggtatgtgatcaccctaagaggaaattcatagaagaaaccatttatttcccagttcatttcctagaatttccagcttttcttctttttgcttgcttgctttttgttttttattatcrttatgtagtaatggattaaaacatttgaacaatccattgcagttattttcttactgattgtcargttgccccgctttggccagtgaggacctattcatactgctttctcagaccttttgacatgaccatggtagtttgtaatagttttcttgttctgtggtatgccaagatcttccagattcatctcatacagttcctgccctaggcctggaaccagcatctctaagaaccatcttgctcccccggcctgcataccaccccagtttccttagaaataatgcttaggggccacaacctgagtgccaagagcattaattgctattgatttttttctggctgctggagatgtaacaatgaataaacactcctcattatggttgtgttatgtaaggagagatagctagcaacatcaaaaaagtaagatgtatcatctagattgtagtgcatgcctggggagaaatactaaagagagggcaagaagtacttatgagaagtgatggtgtcagttttggatagagtggtcaggataggccctactgagaaggtgagaaaatgatgttggaccatatttgaagaaagtgagggagtaagaagtgcagatatctgacaggtgtttagcaggcagtgggaagagaagtgcagtcgccctggagtgaccattaacacctaatgttaacaacaagtacaagcaaagtcatctccacagagagttttgtctgttttgttctcacgtacaatgatgtctggcacatgggtttattgaatgaatggttctatctgaagcattttttaaaattggctatagttttttgttttgagtgggtaacttctagctctaacccttccaatcttaaaaaaaatgttgtaaactttgtaacattaaaatccgctaagacatttgagttgagacatgaagcaggggcgttttgagcactgattaacacatttaatatacagtagtcctctcttatccatgagggatatattttaagacccagtggtacctgaaactgagggtggtaccgaaccctccatatactatacttttttcttcttcacaatgttatggcttctctttggcatatctgaattgccagcatcattactcttgagctttggggctgctattaagcaaaatgagggtttattgaacacaggcactgagatactgagacagttgatctggtaacataaaggctacwaagtgactaatgtgagtgggttgtgtctatatcatggatcccctggacaaaggagcygttccagccctgggcatgatggagcaggaatcacaaggtttcatcagctactaagagcattgcgcaatttaaaacttttgaattgtttatttctggaattttttatttaatattttcagactgcagttgactgtgggtagctgaaatattagaaagtgaagccgtggataagagaggactactgtaatgctctgtaatattatgagaacatacaagggctcagatagactgttagaatggaatgagccaattgtattagaaggcacagctttcttgcccattttttattttcattgtcacttagcataattgcacattaaacacaaaaaaagagctatatcattgttgcctaaaatatgactacctcttaaaattgagtgactttagttgtcaaaatgtccttatgtggatacagaccagttgggaccagttttrccagcatccagtgggagctgtgcctagtgagagttgctatagaaagtatctctatgcattatctgtttggttggctacagaggaatttatttgctgcttctcatgtataagggaaaattggcctttctcctcttagagcaatttgggatggattattgaaagtgtcttatcctcttgttagaaccccactggttttgtggcacactgaacacttactacagcatccctttaaattctgcaccccccctcacccctgatatgctgagcagaactctcatggatccctctggccctgtactctgtctcttgcaggtagccagttctgtactttktgttaataatattcctccctgtcttgtcagggggcagcagtacagtgttagaggaaacacacaagacctgatttgctgtctggatcccaccacttccctatgtggctttgagctttcccttgagttttcagtctggtttctcctcattgaggtcaagataaagtctgctttgcctccctcagtgtattattgaacggttccaataaaatgagaacagtaaagcgccgcgtaagtggaaaagagtatcattatcatgagtctctttagtgcccaagtcatgctttttgatttattcattcactacttaacaaatactaattggacattacctgtgtgccaggtactgctttcaggactggagatagagtgagaaccagacagatgaggtttctgtcctcaaggagcttgcatgcagatggggcagcaaacaataaaatcagtatataaaagaattgcctcaagggttgaatactctgaggaaaaataaactagggaggatgcagagtggccaggtcagtgggtcagggaaggcttctgtaaggagaagtttgagcatagtgtggaaggaagtaagggagtgaggcatggaacactctagaaggaagagggtttcaagtagaaggaagagcaaatgcagatgccctgagctgtagggttaccagataaaatacattacagccaatgaagtttgaatttcaggtaaacaatgaattttttcaaatataagtatgtgacaaacgctgtgtgggacatacttatactaaaacaaaaactgttgtttgtctacggttaaaatgtaattgagtgccctgtttcttttccctaaatctggcaaccccactgaggtaggaatgaacttgcatgttcttgggacttgcaaggaggttggcttatgtagggcagggtgaatgaggcaaacagtgtaggagttgaagtcagattctataagatcttggtataaattctgggttttattctgagagcaaggagaagccattgcagcatttgagtatgtgtagaatgtgatccaattttggcgtttcgtttgctcttgctacatagaacaaatggtaggagcaagagttggaagcagaattgttgctacattcgttaaccatacagtactgccacgcagcgggagtataatcactttaaaggatttcatacagaagacctaggcgatgatactccaatattgaagactggactgtgtttttgggactgtaggaaccaaaagtttagccaatgtgcttcaaatagtgattgagcatatcagctctggggcaagacaggtggcatttccatctttagctgtatctagtctgtgcttcggcgtcttcatctagcatgataattagcctttctcaagaggttatttgaaaagaccaaatgagatgacctgtgtaaagggcttatcctcatgcttggctcctagtacatcgcaacttttattctttgtctctcccagcccactccccctacacagctcttcagataaggagtcggaccaaaatattaatcaactcaggtgttggtgcagagaactagcctagaaagctgaaccacttaccacttacatgagtagacatcctttaccatctgcattttatcattaaaactttagaaagtagaggaatcgggagttggcatgtggtagagagaagtgcagggggcttacttttttttagtgtatcccttaatgagtaacttcactggatgtcatcagtataacaaatgtgtgtatgtttatgtatgcatgtatatataagcgtaatcagtgtgtcaaatgaatatttagatatatagtcaactgtattgatttgatatatgaccaactagcctaacaggatgacataaattctatctttcagatcttataggataataaaattaagagggttacctgatccaactctaaagtagatgagaaaacttgaaagccaaatggtttaaaattacatgcctagttatttgcagagttgggcatagagtccattttgactgatcccagattcagttatctttccccactgaaataggtctcttatccctcactaagcttggcctaaaggtaactctaatgtatcctggtcagagaggmaacaaatttcagttgtcactcagccctgccactcactagagaagttatagtggcaaattcacattaagccttgacttcatcccatgtaacatgttgctagtacccgtgttataaggccctatggggaattaaattgtgtagtgtgtgtgtgtgtgtgtgtgtgtgtgtgttacgaagcccaacatattctaagccttcatacatgatggtatgcttatgtaactcctttaaaaattattctcttaatgttcattgtgaaatgtataatatgtagattagcaaaaagaaaatgaaaagcacccagaacaccatcatccagagatgatctcagacttctcgtatgcatttctctcatttagttttgattatacttaaatcatctgaaaaatacagcatgaaatcctgtgtgttggtgacccattagaacagaatacttcacattaatcatgaaagaaaaagccataacaaagactaatcattattctttcaaaagaatagaacattactactaagagttttgccatattatatctaacaacatgcatatatacattggatttattagttttcacagtagctttattactttttctttccatctttaaactccaacttgagctgtcttatgtatctgccagcaacttttttccccttaatataatgaattgtccatcctacagaccttagaaataagtctgaccagattagacttctagggactcagagaatgctttgattcacaatgttcatgtttaagctgcaaaaccctttttgttcaaagaagtttaaatcactatgaggaggaatgtcaaaaaaacaaattgttgtattttatatctccttgttcaagaaaagggattttatagggtcctttccatggaatgtgcattgatgttctaaagttttagcctggctggtctttgtttgtttttgttttctcttcattttgtggcctgaggctagtgagctaaaaagattagttcatgtcagagtttgctttccaattgaaggttactggaggaatgcttctcctcaatcgattgttgtgtgcgtgttgccgtgagctcagacagttttaatttcttagacttatggtggtaaattgtaggctacttttaagactgtccagtcccttccctggcagagggcttgagggaggtctttcccaggccataaaagctgggtagagatggcgttgacggcagggggttggtggggggaggcagggtacccagtgtgtctccatactgaggggaaatataaaatcatgtcccagggagagagtaccaggagccacagttgagaaagtgtgaaggaaggtggtcatagacagctgtaggacgctagggctctgagagccaagagtagaagagctattgagaatgacttgaaatagaaccattttcaggtcaagaaggtggtgggtaggattccaacttacaagggacgtgaaggacctcttcaaggagaactacaaaccactgctcaatgaaataaragaggatacaaacaaatggaagaacattccatgctcatgggtaggaagaatcaatatcatgaaaaggaagaatcaatatcatgaaaatggccgtactgcccaaggtaatttatagattcaatgccatccccatcaagctaccaatgactttcttcacagaattggaaaaaattactttaaagttcatatggaaccaaaaaagagcctgcatcaccaagtcaatcctaagccaaaagaacaaagctggaggcatcacgctacctgacttcaaactatactacaaggctacagtaaccaaaacagcatggtactggtaccaaaacagagatctagatcaatggaamagaacagagccctcagaaataatgccacatatctacaactatctgatctttgacaaacctgagaaaaacaagcaatggggaaaggattccctatttaataaatggtgctgggaaaactggctagccatatgtagaaagctgaaactggatcccttccttacaccttatacaaaaattaattcaagatggattaaagacttaaatgttagacctaaaaccataaaatccctagaagaaaacctaggcattaccattcaagacataggcatgggyaaggacttcatgtctaaaataccaaaagcaatggcaacaaaagccaaaattgacaaaggggatctaattaaactaaagaacttctgcacagcaaaagaaactaccatcagagtgaacaggcaacctacgaaatgggagaaaattttcacaacctactcatctgacaaagggctaatatccagaatctacaatgaactcaaacaaatttacaagaaaaaaacaaccccatcaaaaagtgggcgaaggacatgaacaggcacttctcaaaagaagacatttatgcagccaaaaaacacatgaaaaaatgctcaccatcactggccatcagagaaatgcaaatcaaaaccacaatgagataccatctcctaccagttagaatggcaatcattaaaaagtcaggaaacaacaggtgctgtagaggatgtggagaaataggaacacttttacactgttggtgggactggaaactagttcaaccattgtggaagtcagtgtggcgattcctcagggatctagaactagaaataccatttgacccagccatcccattactgggtatataaccaaaggactataaatcatgctgctataaagacacatgacatgtatgtttatagcggcactattcacaatagcaaagacttggaaccaacccaaatgtccaacaatgatagactggactaagaaaatgtggcacatatacaccgtggaatactatgcagccataaaaaatgatgagttcatgtcctttgtagggacatggatgaaattggaaatcatcattctcagtaaactattgcaaggacacaaaaccaaacaccgcatgttctcactcataggtgggaattgaacaatgagaacacatggacacaggaaggggaacatcacactctggggactgttgtggggtggggggaggggggagggatagcattaggagatatatctaatgctaaatgatgagttaatgggtgcagcacaccagcatggcacatgtatacatatgtacctaacctgcacattgtgcacatgtaccctaaaacttaaagtataataataataaaaataaaaaaaaagaaggtggtggggctcaccttggggtccagctttattggtagcatcctctactggtgggttaagcttgttaaaggaccctggacagatcaaaagaaaacaaagttagggattaggaagttgttactagccttcagcaagattttccttgaatgttattaatggtgttcttatttaggaaaatgttgctcatttgagagctgtttgtttcagtacttggagttattgccaatgctggctttcttccaatcctggtaatcctccgaggtttcccagagaaagaaaygctttgttttgtttttcccttctccccatgggataattggtttatgtataatttaattattttgttaaccagttatcctatcacagcatacaaaaacaaccttaaaaacccaccttcccgctctgtgctaagatgttcataattgattttcccaccattacgagtgcatgtataacagcaaaatttcttgctaaaagctaaattggattgactctatattttatattttcaggagtgcccttggagccttagggagtaatacccagtgatttagaataagaagaactaagataaatgatcagtttcaaagaggcattacagtcttcaggcttctgtagggaagtcatctttttaaaaatcacctgggactgtattttcatcacagtgaatcttgaaagattcttcttgcagtggcagagtgaggagagaactttatgagtatctggtctcgctcatgtctctcctcttagttgattttctttagtcttgtttcatctttccccatcatgctattcctgggaaaacttcatcctggtgggtggctggtaaatttggttatttacttggtgtaaggtgtatttcaaatctctactttccttgctcatcctttttttttttttttttttttttgcggggttgggggtgggatggggtgaggttaaagatctcacaatcaagtctacaatccatttgaagtcttcatgttataaatatgctttattgagtccattagcacaaatctaattggagctaaataattcaatctggcctaagaatacaaggtacagatgtgcataatgctactgagaccagcttaggcttcatccacttgcaggctttttctctgctgtttttcctcatttttctcatttgtggagctgcagatattgcctttcatggtcatgttgttgtcagatcccagtaattagactgtaggcctccaaggcaagttggtcttttcttttttatgagtaaaaaccattttagctttccttgtggggaatccttttgagtctctgaatcattcacaaatatggtaaggtctaattttatcccgtaagaagataagagaatatttcacttttcctattcagagattccgccctctccccaagctttgcttctctctgcttattgctttgggatcatctgcagtggcagatggctttatgcaaatcaggccaattactttggttatagtaaagatcaccttgcattatgagtaacttccagattaagtaaaactgacatgtttctttgaaaacttacccagactgagagggcacactgtcttgtgctgacccatgaggctatagctccacacatgtctctgctatcttagtgacccctttaaggacattccctcactctattgctcattaaattttatagatctacctggccatagaaaaattattttcaatgcctgttagccatatttcataatctcattatttattagtaaacgggtgataatgctgtcttcaaattttatggctagttttgacagagaacagacaccaatataactttaatgcatttctcatttttttgctagaaattaagttgcctaatagtctttgataacctttgctgaaataatttctatagaatcaagttcttttttcctttctctttcctcctcccctcaatttctaaaccttattcattgacagaacaatccatcttccagaytggctctcacaagatcatcaaggttttttttttttctcctcctttcatttctttctcagataggttttaccaccttatttcttgagatagtgtgaagcaaatagctagaaaatgagggaaaccttgaccaattagccctaagctatcagtggcattcctaactcagataaaggattgagttctgtggctccaatgccattccctttcctttccagatatgccacagcagataaggatctttcctgtccatttgctaaagggtcacagagacaccttacattctcattccccagtggcaatgtttcagtcttttaactttctgccattagactgcctttccttctggtacagagatgtgaggcttaaatgactaaggaattaattgctgtaaagtacttcgaaggacagatgtaaagtataatctcttccttctgacctttgctgctgattgtttcatctgagagggcacttgtatctggaatactagctaaaagcatgggaatttggctaataataaaaatagcacatattaatatagtgctagttgtgtgccaggagctgttctcggtgctttttatgtatattaattcattatagatgaagctgcatatttagtgtcactgatgctttttaggttgaaaattggtgtcctcatttaccttggagagcaaaaaatccctacgaagaagctgatcataattcattggtaagtgattttggaaaactctttctagacttgtgcatttaggtcagatgccaagtgatacatgtggaatcttctagaaatgccaactataacctgaaatagtgttacactgaaaaacttctgtattcgtctctgtggaagtctaagtgactaaatcagtcaaccattagcataggtttgtttactgagcaattctctgagggttcctgaatgataggctactgatatgagtaagacctggtacsagctgtggaggcccttagtgatctaataaggctgatggcaaataatgaccatctctgtcacaaatgctgtaatataggcctgtgggaattaatgaggaagaggtcattttagtctgcaaggttcagggtagattgaatagtgaagatgacattggggccgaatttaaatgatgagtgagtttatataaggtcaaggagaaaagggtatctctcgtgtgggaaaatgagagcatagcagtttcagggaggagagcatgcacgcatggttcagttggccaaggccataggtgactggatgagctaggctgaagatgaaattgggaaggtaggaaggggactgtgaaagtacttgttgccacattaaaagcttaagtctttactctttagaccatagatcactaaacttctacaaaatacccagatagtaaatagtttcatctttgcaggccatattggtctcattgcagctcctcagttctgccattgtagcgcagagagcagctgtatatgatatgtaaatgaaggggcatggctgagttccagtaaaattttatgcacaaaaacaagctgtgaggatttagcccaagggctgtagtttgctgttccatgctgtaaaccacaggagtcgtaggatattgtttagtcaagaagggaaatgaaactggatgtggcggctcatgcctgtaatttcagcactttaggaggctgaggcaggaggattgcttgaggccagccatttgagaccagcctgggcaatacagcaggaccccatcactacaaaaaatttaaaaactagctgagcgtggtggcgagtgcctatagtttcagctacttggaaggctgaggtgacaagaggatcgcttgagcgcaagttcaaggctccagtgagctgtgattatgccactgcattccagtctgggtgggagtgtgagaccctatctcaaagggggataaagaaggaaaagagatgagtgttcagaatgagctatggtgattactgaaaaggtggactcagcatgtttgagatgttctatgaaataaatactggttattatgtttctctattattccaatcactcgttgtatccagctatattatccagagcattaggaaaaatattcttcctggcttttaatttattctgtttggaattttaaattgttctcactcatggcagaaaagtagtattcttggctctttaaattccttagaaaacaatgaatttttgtttggactgggacaaaaccagaagatgagcatttatttccctatttaactctgtggacagaaagaggctttctggcaacttccacgttgtcaaacagcctgctaagaattgacttcagttttcttagaagtctgctgtcctgtggtagatccaagtggaacagtaaatttgagtgctgagaatttcaaggtacatcaaccatactcattataaaaactgcattttaacatagctcagggctttgtaatgcctgtgctgcttttctcaatttctaattttttaatgatgtccctttgggcagatsagcagtcagcagccttggcttcagtttgcaatcctgggaccttaaagtcaaagctgcagcagacaagacttacttttgaagctctcaatttaattgactaacccttttaagttttcagatgtcacatcatgaaaactattatgctttctgactttttatcttctattcattttattaaatttctgttgctaggcggaaattcgtacagattttaatattctctacagtatgatgaaaaagcatgaagaattccggtggatgagactacggatccggcgaatggctgacgcatggatccaagcaatcaagtccctggcagaaaagcagaaccttgaaaagagaaagcggaagaaagtgagtttcttattaattcagtgcagttagatgccagctttcttttaaaatttgattttgcttggaaacaagactaagagaaatgtcatatctcaaatgatattctctcagggtgaatctgctcagtctcttgtacagctgtttttgggttgtcctttccccacttacaatgctcccacttagcagggtctggcacaagtttcttgggtgaagccaagcagaatatctgcctgtaagacttttcctttgaacctgtctttgtcagggtatcaggaaactttcccccatttccttacctgaatccaaccttygagagcttcctattatatcatcatgaaaattttgtatttttgttgtttttcatccctggcttttggakagccagtgagtttcattgttactctgtctggttggtgcttctgcttatgcccgtaggrgagagagagagagaaatttgattaaatttgagccagtttctttctagtttatgaggacaggcttggaaaacctctcgaatacccctgggcttagaagactttatgccctgttagctatagatttgatggtctggctttagattaactgttctgttctgatttcagaactgagcaaagtgagtaatttgctcccacatctaaaaaacttaaaaatgagtttggtattcctaatccaactaatttgatatgtttgaaaaagaaaataaagatacatttgcaggatcccaagtcacagtttgataggtcagttttgcctagatctcttgaatttgtgagacaacaggaccacacattctgtcaccaaatggttgtgtatggaagagcatgtgttcagatgtgcaggtgggctgtaaaaagaaataaagaatttttctgtatattcctgtggagtaacctcgaggatatattgttaggtgaagaaaagtagagaatagtttacattatttttgagagagagagggaatttatatctatgtatacataaagatatatacagatacatatatttgcttcttgctgttagtttgaaaacgtatttttcttattttgataaactaaaattaaaaataaaggagatggtgatgatggttgcacaataatgtgaatgtgcttcatgctactgaactgtatacattaaaatagtaaattttatgttaggtgaattttactgcaataaggaaaaaaatggtccaattattaaggggagttgggattagcatggaggcaacagaaactaccatagaaactagacttctgaatatatctgactttgtagatttgatgctggaatcattttatgtaagtgttaaacaaaatgttattaccaaaaactaaaaattaaaaggaatataaaacaaatgaactgactatatatccatccagttttgatggaagcgcacagaaaaagactgttcttagtgacttcagaacacagtaaactgtacacttctgatgggatatcacaaaggataaaaactgtaaaaacatcttaaaaccatttttattaatcatgtaatatgtggtagcattgatattctcattctgaatccattgtgaacattggagtaaagcagatgagtaattatgttagtgtctttgagaagtgggatttgcagtgtggaagagaagaattaatggatggtaggattggtgatgttatgtaaaaacactatgaccttgagtttgaattggaagcaccagtctaaactcatgatttgttttatctttgaggaagaacaaatttcctagctagggccactatcaggcctataaatagtaataaaattgagtcccttaagccccacactttagtctctaaatgctgtttctactaagtggtataagaggttcttggaaaaatggcttattaaggtccaagacagaagttgtacctgttgagcctacaacagtcttgtcaggcacatctgtctacccatgtgcagagaagctgtcaaagaagactaggatcgtgtcaaaagaacttaggagccagcttggatagcctaccacaggcctagatgggacaattggatagtcagtgagaggaatakccacaatattttgaagcatatcaaatatgctttgatgtcataatgattttttaaattaaaaatcctcatagatcatcattagagtaggctaaagaacaagtttattattctgaaaaactggcaaatgaagagaaagaatcaagtatttaccaggctccttctttacaaaccttagagttacctcagggtgaccaaatggttgatgaggggtagtttctctttatagagaggtattattccagctaataaacaaagaaggaatggtaaaatatcatcattttgcagtccgtaatggattaatggatctagctagtgaccatccaggactgctaacatcccaagacagagacacctgtacattgttttctatgaggccaagagacatatgaggcaattattacgtatgctctctgactcttgaatcacacaggtgcatttagaaaaaataaagggcagttgaagaagtatgaatattaactggatatcagatgatgttaaggaattactaggttttttagggataatagtgatgttcaagttatatttttcaagtgaaggtttgttccttttagggatacataccgaaatatttacagatgaaaggatatgtctagaatttgttttgagataatctagaggggttgggagaaaatgggggtatagattaaatatgcattaataattgttgaagctacacagtaattactttggcattgactatattgtcatgtttgcctttccatgtgtttgaaattttccatggtaagaggttagaagtattttagctgtagataaaagaccaatagtgttagaaaatactgtcctgtcttaccttcctttaatcccgattttacaaatacactgtgcttttaaaaggtggaattatctgtccataccttgtactcatagccataccaagggctgcagtgattttgtttctctaaaaccacaatgaaaaatgatttccttcctttgtaccttctagaaaaacagcattccccaccctttgattttgttaggatgtaaacatgactttgggattggtcaatcatttcttggcgcattactgtgccttttgtatgtggttcagtgtgaatcagtatatrcctctttgttttccaggtcctcgttcacctgggactcctgaccaaggaatctggatttaagattgcagagacagctttcagtggtggccctcttggtgaattagttcaatggagtgatttaattacatctctgtacttactgggccatgacattaggatttcagcttcactggctgagctcaaggagtaaggagattacttttcaattttaaaatcagaatacaaaaaagaaattgtaaactcttaaagtattacctctattagtgtataattttttgtcgaggaaaatgaaagtgataattcactaaacaggagataagaagattattttcaggagctaaatacatacactgtgaaaaggataatatgttttcattgtcgctgaaggctccagaggcttcataaatgaatgccagaaaattcaaactaaggagcttattctttgctattacaggtgcttccaacatctggagcacaaaacattattgactttcctaattccctgtctcttgctgaaattcataccactgcctactcaacatcaatcttgctaaatcttgaaacagggcaggttcctgtttgtaattcaatttggatagaataaatttcctgaaagccctgagctgatcctttttcaattagccaactttcagctgagtctgttaactctacttgggtttttcatttcactgaaatttgcttctagctccagccctcctgtaatcccttctatattggcatagctggctgagcagggacgcttccatcccctgcagtcacttaggattactgcccatggagacttcccacccaacagtcaagttgccatgttgctatatgtcgtatatttccagaaggaataccttgaatgaacattctagagytcattgagatgagagacatgttaaaacaatatatggtggctcccagcacttcgggaggccaaggtaggtagatcacttgaggccaggggttcaagaacaacctggccaacatggtgagaccctgtctgtactaaaaatacaagaattaaccgggtgtggtggcccatgcctgtagtcccatctactcgagaggcagaggctgcagtgagccgagatcatgccactgcactccagcctgagtgacagagcaagtctctgtcttaaaaaaaaaaaaaaaaaaaattggatacacaacctacaaagtggctgcatttatacagttagcagtcactcatctggtgtcttctgtaggctagttttggtgtcgggcatacagagatggccagcttgtggtcaaagatcttgctgccaatcttttgataattacaactaatatattaaaaataattacacaaattccaattctattggtgctaattgaggtgtacgtggatgctagaatgtaagcactgggattgcagaaaactgagtatcgtttgtcactgtgtagtgggcacctagatagtgcctagcaagtaatgagtactcacataactatttatagaatgaatgagtgaaggaataaataggtgaatgaatgagtgggtaggtaaataaatggagtgctgtggtagaaccagggacaagtactgcctggggaggtcaggaaagacatgttagggatttatcagtcagagactgaatttgatggtcaagggaaaatttgttcagtatgtcctcacttaacatcgttgataggttcttggaaactaggactataaatgaaattatgtaaaatgaaaccaatttttttcatcaacattataaccagtgatttgaaggaaatgactttattggagggcctgctatctgttgttttgtttaaagtcccagttttcaggaacctattgatgatgttaagtgaggacttaattctagtagtctttatgcacactggggtcagggctagatgtgttttgtttaagaagataattgtggaagcagtatagagcagtggtctttaaatatatctgtacgttagaaccacctggagatctttgtatttatttcttaattttgggggatcttttaaaaatcccatagaccatgccataggctaattagatcacaacccttgggggtaggacacagccataagtattttgtgatgcctccaggtaatttcattatacagacaagtttgggaaacactgaacatggggtggaccagagatcagcaaactatggctcagcaggccraatcagccctctgtctttttttgtaaatacagtttcatgggaacacagccatgcctattgtttacgtatcatatatagctgtcttcattccacaacgggagaatgggccagttgtgactgaaaatgtatggcctgcaaagatgaagataatcactgtctggcccttaacagaaagggttttctgactcttgggaggaaactggttctgcagaacctagttctttcataaacaggggagaggaagaagggtggctgatgtggtggtagtacagagctgtcaagcagagtcctgtttgtgactctcgtcctttgaagcaggatatccataatttggtgaaggattatcatggggtgttgcagataagcaacagtggtgactgattagtgagtggatggcagtagggttagcactgactcgttcctacacatgaagttggcctaccaatcaagtacatcgtcacgctctgagcgcaagtatggttttgtgtggatggatgcatgggtgggggaaagggtgattaaaaaaaactgtaaaccatagtgctagttctgtaatatggtcaagcgaggaggaaaaatttgacataagagaaaaagttaaggaacagtatgaggcaggtagaaagaagttaatactatagaggctagaaattgaagacatttagaaaaaggggaggggaaggttagtaagggtgctaagcggtaagaacaggctctgggggagaaaactaagttattgagtatctagtattcattaggcactttcttttcaatatctcattgtgaagaacccctgagagactggtatccaatgttctttgtatccagtccttgttttctggaagatgagcaaagagattgagagaggttaggtaacttgtttaaggtctcacagctgctacatagtggtgatggagtcagacccatatcttccttgatttcaaagactgtgtttatatgccaccatttgcttttgcaagagtcagaatcagggtactgggttggccttaatggatggaaataatttatataggtagcagatttgaaagggccatgctgtcatctctaaaaaggatttttggggtggcatttgcccattaaagttgccaagtttattaccttttaagtaaatgatttttctcttttttctcccctctcttttgccgtttctctagaatcatgaagaaggttgtaggaaaccgatctggctgcccaactgtaggagacagaattgttgagctcatttacattgatattgtaggacttgctcaattcaagaaaactcttggaccatcctgggttcattaccagtaagtgctacatggtgttctgacttaaggttttttttcccctccttaacaaaggttgcatggttgtgggtagaaaaagcttatcaaatagtatcttttcagctgtrtggagtgttgctcattcgtaattgaaattcagattctcagtgactttgtactttctatggctattcgttattttcattggtttcttagaaaacaagtgtcaacctcctttctaccttgactaatgttaatacttagccttcctctcagtatgcgtatgccagtgtcatctatttaatcaaataacaattttgataaaatatgtacagtgtcatttcttgtgttcygtgggttttagatcatgattcgcttttcttaccctttacctcatcagtattcttgtcattcctggaagggaaatctgggaatacgttatctgaatgctggggtcttgcactttttaagataagcccattaagattagtatgtctgtggtacatgtgtactctgtgcagtctttattatttagtagagtagctcagtgtttgcctgagtgtgggtttgggaccacgatttaatatttgaaatgcttttacctggtatacaaacatggcactaaatcacaatgaattacataacgaaatttattaatttttcaattttctttcagtctttttgagaaaaggtgtagtttgatgctactctgtgtccgacactacttttaacacatgcatttttaacaatgtgagagtagctgtgagtctcagcattcagcaggcaaaagtatctattctgaattgtaaaatatttcctaaaggttatatgcttttttttgttgttatcttgcatttatggcagtcaatactgggttttatttatggtctttaaaagtttcctttaaaaaatcaattttaaaaggtgaataaacttaaatatatttaacaatgtaaatggcacataaatataaaaaaagcaaaactaaaaacttgctgcgggccaagatagtgctctaccttttgcatgaggtgtttttctggtttttggcttgtttcttgaaatcttgacccaagtagagctgttgttttctaccattttgtaaacrgcagacatctgataaatgtgcaaaggaatctacacggtataggcttcccttgactcacatatcctcgctgttaagaagagttctttggatggaaaaatattctcagtggtactgtttaggtgaattaaaaaaggataattttgttattaaaatggtcaccgttgattggtatttgatttcttgttggatgaaaaggcaccatctcagagggggttttatggatgagtgtaatgtttatctgcctttctttaataaatcatctatgttagtgatattacctggcaggaggtctgttagtgctttagctctgcagtctttgtggtatggtgaagcaaagattccattaaaagcctactcagatcctcttggaagtttctagctgatttctttcccttttaaaaattagaaattgtcagggaaaattcaaaattttcccttttaaaaatcagaaatttaatggaatgtattccattaaatgtattgctgttatctgatctttcaattaggaacaaacccttgaggccagttggtcttggaaaaataattgtaaattttgtccaatttacgtagggacctaggaaattcaattaaacatatattaaatgcctacacacaactagtattctgctaggtactgcaaagctcatacgcattttacttcctacaaggcctttgttgaaggacatacaagaaagtaaactgcaagtagtccaagatatgccatgttttatgtcaaacaccagattagaaattagggcatggcaaggagctcctgaacatccatttcatagtagtgtggctgagagcaaagagaagtttctaggaggtatttggcatggctgctgcgatcgctgttacgggaaggcgagctgccttgggcatcaaaacaaacatctttttaagtcattagtcggcctatgatgctccagacacagagacattagagggaagacataaatattagcagcacattataaaaatagttgcaaaacacacagatgcaggatgtgattgaagaaggaaaactataatgtcaaaccttccatgtcatagaccaagtccagtgtcctgtctgtgctttataaattaaacctagataagctagaaaagcaattcccaagccaaagcctcaagtaaaaggatgtcgaattataaatttctgagagacatccgatcattccattcctctttcaggaagagcccagtgccgcatagcttacatctaggcgctgtgcaaagtccgggctttcaggagttaggcccttagcagacaactttactcatcaggatttgttttaattgcccaaatcaaaaataacaataataaaacttcaaagttaaaaatgtcactagccaaagctagagaagagtatatcgttagcattttatatccatgagttccacatcaacggatcaaccgcagaccaaaaatatctgaaggaaaaagataacaatacaataataaaaatacaaatatgatattaggcattataagtaatctagagatgatttaaatatgagaggatgtgcgtaggttatgtgaaagtactataccactttatataagggacttgagtatccttggattttggtgtccacaggggtcctggaacaaatccaccagataccaaagatggctgtagactgttggagtcrattgccaataaatggaagaagctgagccttcaagccaaggctccacatgaccacagtggcccatttctccctgctttgcctgcacagagtgctgtaatctttgactcacaaagtagtgctggtgaatcccagctctggttctctggtaggagtggagcattccccagccccacaaatcagcrtgggtcctgtcctctcctcccactttttgcagtgacctgcagagctgccaccgttaacactgccagcttttgcagaagaatatatagtggctcaaaccacttccttgtacatctttttttaaacggaaaaatataagttaagaaatgggtatgttttattaagaagtggaaagggatgctctgagctattcaaagagcaacaaaaacaaacactgatcagttccttgggtccctagctttcttttttcgggactgtgggctttatttctgcccacctatcggccacgaggccaatgacatatctttratgatactgtgaaaactcccactgtgatgagagcatattccgtgasagccacacaagaatctaagacagggaaattcctcctgtagttagcttgtatttgacttgtggtggtggcctgcctgcctttcttttcttcacttcctggccttgacgaatggtagtgatctctaatgacaaaactagcacacagaaatgaaaatttttgagtatacttcctaaaaagtccattctcatgtttggattttttccccctgaatcatacattgaagtgaaaataaaagttgaaagaatgcttttctgatagtaggaaaaaactgagccagatttttagaagtcattgccatcatctgattctaaaatgtggstttcaatctttacttttatgcttcttagtcttctaaaagttattcagaagttattactgatacataatagaaaatagagctgcttttattggccatcctcaagtttaatttacatcaaatattttgaaagtcagtgatgaaatattatcaaaatcaataaattttgttttaggattgattcctttcttccaactggttgctcttcgtgcactctagagcagtggtcagaaaaccttctgaaaagagccagccagtaaacattgtaagctttttgagcygtatatgcatcgctgcagctacttagctgtgctgttgcaggatgaaagcagccatagagaataggtcaacaacagggtgtggctgcattcaagtacaatttttattttcgaacatgaaaattggaattttatgtaatttgtacatgtcacaaaatattttttaaaaaccatttaagaatgtaaatattattctaagctcacagaccgtacaaaaataggcggtagaccagatttggccctgttttatggctttggtggaatagtaaacaaaacattttcacttgtatcttcaagttctaggagaaagcaaataaagttctattactatcagatatataaaaaaataccattgcctactgaatgagattctaagcttaatgtaaagtcaaatactccaattgatgaaaatgttgaatgattgctcctagagataacacgtgtcatatgctttaagcagaataagacctctatagatggtagctctgtttctttggcatcagttgattagacacctactgtgtgctcagctctggctaggtgctgggggtacagcattgaacatggcagtccccagttcaagctttcatagaactttttattttgctggtagttgaatgatcttctgtaattagttacccgatctgaagcaaatcgtatctgctgtgtgatgtctcagactctaaagtgacacaagtagatgttcggtacacaagctattgtaaaacatcacaattcttgtctggtcctgcttctatttaaaaggatttacctatttttagtagtcttgaaggaagggttagagcttttaccttttcaactttgggggcaagtatgtagtgttcaacacattgcttttttctttcaggtgcatgctccgagtccttgattcrtttggtactgaacccgaatttaatcatgcaaattatgcccaatcgaaaggccacaagaccccttggggaaaatggaatctgaaccctcagcagttttataccatgttccgtgagtattcctgtttcatgtatgctttccagaatgccaccaaagatagatgggaaaattagccgccatctattttgggttatgattctcaggaccattagctgtagaagtgtgtgctgttgaaccttttccttgggaattactgaatttgtttttttgtttttgtttttgtttttgttttttagttgaaatcgaaaggccacatgaatattttttgaaaagccttgaaaatgttctggagaaaaaatgttcaatacaaagtatccttagaaactatttgggaaaggactttgcagttactttagattggcaggcactaaacacattttatgccacatggatgctatttagggtacactttgtcactaatgagaggtgaagtctttcatgcagatctattttccacataattaaaccttaattatttaagcatcaaactttttaaagaaaaaaatagcttttaaaaatggagctgttttaaactcagttttgtattttactgatttttttcaatcctaggcccagaatgaaattttaccttctcttgctgacttggtatcattgttttcagcagcagtgattatttcatgagccgatatagtaagaacagcacaccaaatgatgatgaattaactgaccacagatgctaggctcttagacattttctgtttctataggattattttcccacttttaccatttcttcctgctgctttctgtttacttggcactggcctcatttctaattagctgaggactgtgaactcaaaaaaccacatttgatagtgttagtaccaaaaacgaatttattttataagtcagtagtccttagtaatgagatgaagtcctattccagaagtgaaaggccacatgagataatttggttgatgagagaattcctattttctaaaattatcaggataattttaatccagaggtttccactttataacttctgagatgaatctgtttgctttgtggaaacaagacccaaaagaccccttcctgatcttcttcccatgtggttgcccctcccccttgtacgcagctacctgaaggtgacccctgtctcacactcactaaatgtaacagcacatgcattggactaatctttgggtgttaggcatgaaaagggagaattaagaatggagagtaattttaaaaatcaactcatccttaagtgttctattaagctcagatttgtgaaagtgtgttgtatgcttcataaacattattgttcatggagctgtatcatcctgctattacacaccgtccctggggcacagttcatggagcaaattgatttttggcacattagataacagatggctttcagtatggtgaggatgctcagagtttgcctctggtttgactttgctgtgtaactttgagggatgggatgagatggcacagaatagcctaagaagtgacctatgtgttaaaccaagtgaaataaaacattaactgtgttcaaagtgactaaaaccgctgggtgatatggcaggcgtgtgccctacaagagatagagtttccagggagtagagaagagaggtttcttttttcctagaaaacataaagttctattttagaatattggaattcagagtcctgcaaacctattttgttctccatggatggagaatttcagcagtattggttgattaaattgaaagaaattcactgcttaaaatgtaactgaagacaaaaacatggattaatttctattaatctgggaagggaataagtttcctaaccatgactcagaattcagcagaaatcagggaaaattgatatgcttgactatattttaaaaaaagaagaacctgtatggcaaaacaacaaccagtaacatcataagcaaatcatgtcacagagggctaaattactaacatagacccttatatatacatacatacatataaaaattgagaagaaaaagttccatgttccaacggaaaaatgggaaaaggctattaacagtttagaggaaagagaaatttactgctctgaacatatggaaagatgttaacctcactcacagtaagagaaatgcatttttaaactgcaccaagataccatgccccatgtacagaatggcagaaatgcaaaagttaaacagcatagctattctgatggtgcagtgagcaaaaccagccctcttcaaccctagtggttagaatgcagcatggtactaccccagtggggatggcgtttgtcaggatctagcaaaaccgcctctgcattttctttcttcaactaagcacctcatatatatgaatctatcccaaagataatgagcaaaatcaagatgtggcatgtgctcaagggcatttagtgcagcactagttgtaataggaagcaacaagaaacaacccaagtaatcatcataggggactgagtgaataatatggtccattaatagagtgaagtactacatagctataaaaagaaatgaggaaggctttcattctaggaggggcatgtctaggatattttaagtgataagagccaacgtgcaggacaatgtagagctactcccttttatatatgtcagatacaaaggaagagtgtgtgtggtcatgttagtatatatgaatgaacttatgtttccaaaagaaacaatgaaaggataaataaactaataaaaatgattgccattggataaagtgattcccattggataaagttatccagggatggggctagaagggtgatgtctcttaatgttccctattttgactttaggaccatgtaaatgttttacctaatttaaaaagagaaatactccaaggaattcaaagtaggatctcgaaaaagtgtttgcacattcatgttcactgcagtagtattcctaatagccatgagatagaagcaacccaaatgtccatccacacaagtggataaagaaaatgtagtgtacatatatatggaatattatttagccttaaaaaggaaggaaatcctgtcatatgctacaacatggatgaacctcaagcatattatgctaagcgaaataagctagtcacaaaaggatgaataccatatgattccactcgtaaagtatctaaggtagtcaaaatcatagaagcagaaagcggaaaggtggttaccaagttgggaggaggaattagtgtttaatggctatggggtttcagtattacaagatgaaaaagttctgaagatctcttgcataacagtgtgaatatacttaacactactgaacacttaaaaaaggttaagatggtaamtttagtgttatttgttttttaccacaataaaaattcaaataaaaaagaaaagcattcactaaaaattgaaaacagatagagacaaacctagctgtacacgtgaggttggtgttaacctctcatacagagaagattattacttaagtggctttaaaagacaatcttttgactatacagttgtagtgggaaatatttatattgttacttgaaactgttatgggtatgttgtaggaaccacgatgtttagtatacaaaaagaggagagtacctaaagattctagattccggaatgatacaccaaccaagaaaactccacaaagtgtagtgggtcaccttcgcaaattgctrggatactacctcattactgtaaaaagtaaagtgaaagaattcagctttgatcatgcctttctagcacaaattgtatttgaagataatcaaatagttgatgagagaaagtcattaattatggagaaatcacaactaatacatgcaaaaggaatgaattagaaaatgagcgttataaaactcctgatgagacagcagagcaaaacagtcatcatcagtggtcgctaaatccatcaagtaacaggttgatggaaaactttctcatggacgaggctgacttgaatggaggaaatatggaaatgaatagagaaataaagcagtttgatacctttatcctattgagatgtgtctgagctggaaaatttgcaacaacaamaaaaaaaaatagttcctacactctgttttccagcgcctgcccacagtgaacttggatgcatgcttgcaagagggtccctttcttcccatgtgacaaaggcctggagtccagtccagctaggtccttcccatagagccctccattcctttaccttttgggtcaatgtggctattttagtggtctgaagagaaataccgttcctttgaatatcaaaacttctatttatttcttgttaatttttcaaaagtgaaacaaatactagtgcttaatatatgagctggatagtaatcattatataatttctgtataaatatgcacatatactgaggatgtactcaggttcctgtgtgcttagattgtgttctactgatggaatgcacagtttggagactgcagaaatagagtgctatacttgaggaaccaagtcttcaggactagctgccttatagtaagatgtagcagtattgtggttcatgtgcagacagagagcgtggggaaggccagtccaaacgaacccagtgggaagataaagaaaaatacaccattgggatgcatcttgaggaacagtgaaatgaaatacgctggaccggaatgtgtttgcgttcttaaatattcatggtacacgtctcactttaaggctccttctgtttctcctctaactcgtttcctaagttggtggggtttctacaaattgaagaaccttgcatttctgtattattttgcccccagtctcagaggttcactggcaccatcgtcgtcaggtgttctctttgcagttaggcattttaggtggtgtccacataaactattcctgacaccttcctaagcagcttctggagggactggtggccagacaatactaaggccatttgattagatctattaagtgttgggttttccccaggaatctggtaagtctggttgttcctccttctaggcccccattcctgctcactccttctgtccgcatgctaaaatgacctctgaactaggcactaaggctttccaaccacaaaaaccagctcttgaaagctcagcttggatcaggctgtttctcctcagagactgcagtgccttccttttgtccatgggatcattttcaaactccacagcaaagtattcaagaccttaggctctctggcctcaactcccgaccatattcctccccaggtcctggccccggtctcaccaaacagcctgctggtccctgagaagcaaaatttaattttttctttaaaactctatgtaagtgacttcctccaattttccaatcaaatttataaagaaatgtaacccaattacaaaaacagggaaagacttcctcccactgaaaaaggctcccctaaccctggtgtaacttttatctttttcacaagtgtagttttacatacttgtcacatacgtactaaaattttgtgtttccttttttccacttaatatatcatctttttttttccttcaagactctactcagatttgaaaaccattgtgtccaagactcttctacacgcaagtggctagttcctaagtcatagttatttggggatgcttttgttatttcttgttgagacttaactgatgctttttttatggttgccaggtacctggcttggcttatatttacgtattatttaactgtgcatacggcttgttttaaatttctgaaggcaatcttttatttttgacagtctcaaacaaggtgcattatatctcagtaaataaatgcaagaaatctgcccgcacagaaaaataagagcgaaggcatttgcctttaccatttagaagagaaagctctaaaattgatgacttgcactgtaaattttccggtatttggatagctctaattatctgcaccacacccacatttacaacttcgtctgkcttgtataaaaacattggcagtggtaaatcatctttatctaattgagttttttcctctctttccctagagttgatggctgaaagtagcaatagcaggcattacaagataccccatccctggtttcagatctcagaccttatttttatatcctacaaaaatttcaataacctttgaaatcagttctgcttaacagcctcacttttcatatcattaccatagagcatttactacattgcctgagcaaactatgttcgtatagttttatttattttattttattttatttatgcgtgtatgtgttaagtacctgcaacattttggctatcattcacaatgtgaagacacacaagaatttgccttctgggtgctcacattctgtatagtcaagactagagaatattcagcatttcttggtacttgtggaaatttggagcagaaaagacaggaagctataacaaagtggagagaagagcagatgggggattctggaggtgtttagaactttcccatttcrccttccacttctttgattttttttttctttttaccccctcctcctctttcccaaatccttgtaaggtgctccttagtaaaggctacagagctgactaagcctaagtattttcttgttccttatgagcgtcagtttaggagttagattggaatctttatttggttgtcgattttatccactgaacagtgtgtgtttcctgaccatctgtgggatgtctaagtctctgttctccagaagcktactttcggtggagtcaggaggtacgcaaaaataagactttctcatacttccactttaaaaattacagacccaggtgaatggagtagggaaaatttgaatgcagaggtggggaacatcctagttgtggcaactagaggcaagttttcccagggtcctcaaaaccctgtcgcttactacgcggctttttgctcatttctctctacttccttgctgtttcttgagtagaataggcacactccccctcaggacctttgcattggttgtcccatctcctggaacattcttcttttagacttccccatctcctccttcaggtttttaattcaaatatcatttcagtgagactgactgtgacctcctcttttaaaatgcaactccttccttccccaactttctcctccccttccctgctttattttcctccatgactttattgctacccagtatttatgtttcacttatttttattttctttttccttccctggaatctgagacatataatggcaggaattttagctgctttgtttattgctggaactctaacatcctgaagagtggctggcacatagtaggcattcagaaagtcttttattgatagaattaaactagaatgaacaatattgcctattatgtttttaatccatgcaacaatgtagggaaggagactgttgtacaaatttaagattgtagaaacttctttaggccagtggcctcatcttactttcttgtgtcttcccagggaacttactcacatttttgggctttcaagtggcattcagaccatratgattgtcagtatcattgatattccaaccctgaatttctcccaggatttggggctcacagccatttttatttgcatgatcaaattgaatgatggcttgcagatcaaaaattttgcctggcaaaacaggaattttagaaccaagtcaattcccattcatgcagataataagcctgttggctgtagcaaaggatcagttaacttccatgtacaattttatttttaggacatgataaccaaaggagttatttgtgattgaaacttccattttggcctttaacttgaatcaggagggctcttgcctttaagttctgtgcagaccactgaggattaggatcagcctcgtggttccttcagtctgagtctcagctttcaggagtgttactcttctaaggagtccattccctcttaaattgctttttgacacttgaaaattttaccctgaggtgccttttgtcaacaatttaggcgctcatcttctcagctcaacttatattacagtttccctagcctgcatcccagccttctctcttgaagaaactagtatcaccaccatttggaaaaaaaaaaaaaatcagtttttgtaaaatttgaagcataacattactatgtatagttttttaatccagatttcttgtgtgacataactatttttcaatgaatttttttctaccgtcggttttatcaggatcagcaaaaacggcatgaatatgatgacaatcagtattcttcttcagtattttaaatgatgttttcagccatacaaaaaaatagaagaaatgttactagaaacccacaaatctagattctacaattaaccatttactgtatcaatctatatgccccagtcctctctctatccatcactccaccttttttttttttttggatgcataaaagaactctctgatgcttcagcttcacatcattaactataattcaatattttgaggggaaaaatgatccacaagcttagaaaaaaagtccagtaatagtggttatttctaggtgatgaaaatgtaacttattttttctcatatctttattatctgaaaaaagttttaatctgaggatatatttctgttataatgaggaaaaccaataaatccatttgtatttaggaaaaggaaaagcgtgtttattgcagaagtcttagcaaaaagtgagaaggcctggactcacaaatacaaaaaggaaaggatgagttgatggatttttgagaaactaatatccctgggactacaccgactgtgagggctaaggaatgggcccaggctggcgctggggtttcttctcttggtgaccaggagwtgtgaagatacattacattcttagagatgtttgggacttactggtagaaaaaacagacctcagagatttatgcagttgaaagaaaggtcaactcgacttagtatgcattttgaattayagtttaaaagatgatattatgactgcttggtagatatagtgtatgcttcatttattaagtagctggtaagctccttgagggcagaaactcatctttatattgtagtttgtcaatacttatcatataagctggtttgtagaaatgctccaaaacatttgtcattgagtgaattattcaagctaagctaatagtatttcttagaagtagttatcatcatactctgctcagggaccacatcaagctgatttgtaatcatttgtaaataggtgcttccaaagtgcttaaaatagtgtttctcttaataagagacattttgttctaaattgtcttaaaatcattgctaatgtttggcaaatctcctgcagttttttagcatgtgaaaaaatctgtgtggtcccacatacatatggcacaagatactcaagaaactgaggtgacattgcgtatgtattctagatcactcttgtgtattttgctctaccttagaacattattttcctctgaagcatggtttaccactgctgttcacagggtccagaaaattatttggactatgaggctgtgtattagagtgacttaaggagctgatgccctgaaagcagccaatctggctctgaatcccagtgttgccatttcctagcatgtagacttgggtagttaaaccaaaactctgttttctcatctgtacaaacatgttacacggttatgaggttaaaatggaagagtcactataatgcgcttagcacagaacttggcatgtagtcagaactcaaaataccagccatcctttttaaaaatcacatttgtttatcttctgggatggagggattactaaaagtacaggatttcctgcatcccgtttatgatgagatttgtttgatttaccttaaaatgtaaataccttctctttgaaaccctcccaacacaatgaaagtctctgttcccttcctaaggcagagcaaaaaagaaaggttggcctgaagtttgaactcaatgaaatgaacatttcagataacatcctcctggacttgtggcttttgatttattataagcaccattaagaacacttgtgataagaccagggcgctctcggcagatgttaccgggtgggctccagctggtgttcagatccttggaagcaagccacactgggccggtagttacttcagaatcacctgctggggcgagtcatggctgagcaaacccttatgtggtcaaggtttagtgtcctgtggcaagtttagagtcacctgggaggcgaaggcatgtagaggtcagaccagtgctcaggccttggctcattaaacgtggtgatactgtttgtaaatcttaagtctcacctgaggtccttgaaaccacacttgcaggttgttgatccctaagttaacatttcacaaggtgagacaggagttaaagtatttggatgaaaacgtagaagagagcttagatgtgaaaktcatagtgtcagagttaattgagtaccaaattatagtcatagcagcaaaagcccaccattcctcacaagtttttctgatatttgcttctccctctcaccagtcaagctagaagctaggagaatctttcacacaaaaatatgttacatatatgtattttttcatttggggggctgaatcattttattttttactatatattagtatattataacatgaaataaaacccattgtttcacttgctggattattttttaagtgcctacctagggactaaataactacatttcagaagcaagtatttcaaagcatcgtgctttaatcaccatgtaaattttctgaaaataaaaaaaatttaaaaacacctgatcctgaatatagtgtcaggtttgagttcaaaacttttagaattaacaaaaaattttagaaatattttaagctgcataataacactgagaatgcacacaggttttgttcctctccccgctaatccttgaaaattccctatgccctcagcttctcaaaaggggggagaaaagcaactatygcctcttgttggcagtagaatttattcagtaatttactttccagccaactgcagccattgccattgcctctgggcactggttcaaaaacgcagaaatgaaataacagattggccagactgaacacaactccccagccacaaccctgtkatctcctcattctgtcacccccatcaggcaaaagcctgggaaacggagggtgacaacacagtttttacatggctcgtgcatttccacagctcagggcttcctgccactgtcccttcttcattgtgttcccctgcgtgcatggcgggcgacattggaggctgggcatcggagtcctaggcctgtgctgcaggctggcctttgcccatctgtctgtctgaaaggatttctacgctgctacaagcatgggaaatggctcctcagtcctagcacaaccagaacaagatgaagggaccagcttcctctgtttgttgaccacctatctgtgaatggatgtggtggacttttcagaatcttgtgtatatctcaatcaccaggaggaatttggtttcatgttatttatagctgttctattcaggtcagagccaagcagagcagttgcttcatttaatatcagccacacatgggctctgcaggctcatctcctgaaaaacggagatttctcttgacagaatgaaggtagaggagaggagcatctctgtttaatctagagagaattattttctgattgtcacttgctggtgaaatgccttttaaaattataggcacaagatgcggatgtttggagagggtgyggggttgctgtcccccttggtcaagcgttagagaagttacagaacccaaatgagagaaatccaaaattttctcttccagaatagcctactctgtagacagtattcctttgcagtggttggatttttttgagtggtttgtgccccagcaggctttaccttttattctgtcttcattccatgcacctgttcaatatagacccataattacatcttttatgagtgagtaattcttagaggagatgaaaggttctgaggattattcatcactttgtccctcaacctcctgttatgtagctgggtgaaaaacacagctggagtcagattcagttatgtggggactctgcgcctattcagaactcccagtcagccctgccccctacagatttctggccagtaggtggtgaaacctgggtgaaagcatttctgctgggaaatggacagtagccttatwctgaggcaacaaggaagagagtacacagcttaatgattttcagacagatgtattttcccctaaaaagcaggttttggttcaggttaatccatcctagagagaagtattcttcatgacggttttactgggaatgtgtgggagagatgacaatccctcacctccctcaggtaagaaagaacagggtaagatgaaaacaaacattttgttatgggtaagatggcctgtgttaaatatgtgattgttatttcttcttgctgattggacactaactgtcctctccatttctttgcacaccagctcataccccagacaacagctttctggggtttgtggttgagcagcacctgaactccagtgatatccaccacattaatgaaatcaaaaggcagaaccagtcccttgtgtatggcaaagtggatagcttctggaaggtgagtcagtctgtgcgtgtctctctctctgaaaagaagcttgttgggtaatttmatttaactttgatccagggaataatcaagccaagtgcccagggcttaatgggatctacttagacataaacaagaatgtgcaaagattcagttgctcagcatttgggtttctaaccaaggctgtatgtacctgctcttctgatagtggctgtacaacagccaccttcactctctgcatgtcagaagggacacattctagctgctttttcacaccttgtacttgcttctgagagccagggccctccaggggttgaatatctttctggagcaagatactgcacagggagaaactttaccaagggagtctttccctctgcttctgggaggtagtctgtggaggtaggcagttccctttcctgggaaatgcagtgggcttcacatcctcttggctatagtcactactcacctgacgtagaaagtaaattcttgctggggctgactgtaggcactttgttcagggaggtcttggctgaaacagcactcttggccacagaccaaaccaagtcctccaaaagcattgggccccttggccctcctgagttgatttcctgagtacatttggggaaagtataacaggagaggaaccagattggatgtgacctgttgacaggtaatgcagatctttttatgtgggaagtctgcctcattggccaaatgtcataatttttttttgaggaaatgtttttagaagatagaagtcttcaggatctcacaacatgcctcttcctaaatgtaagaattcattgctttcttgaatgatcacagactgtggtctcatgtttcttgctagccaaggaagttaggaatcctacagctgagggagtacaggtgatgtacaggataaagaattccttggtactgcttttctgaccctgtgttcagaaaaggaaaagcagtgccctacccctcagctctaaggtactaactacaccaaagggatgatgagatcagcccatctccagggaggcagatttaattccagacaactctttgtcttaaacagctagacctttgtctttgtttagtacagtagttctcaactgcagacgattttatttaccgattcccctctgcccagggaacatctgacagtgtctggagacaattttggttgtgatgtctggtcagtggtgctacaagcatgtagtgggtagaggccagggatgctgtacatgtcctacaatgaatgggatggcccctggcacaaaataccagtaattccaaaggtggaaaaccctcggctggtaagaatgtttcctatgtatgttataccatactttgttgcctcaagtaaaatgaaagtcagtctagattgtaaatggctatcgaagatggtcccataaatttgtgttgctttccttgtataaaaatgtgtcctgtgttgatagtgcattttccagctgactttcagccaaagttgggttaaaacaggcatattgggtgttctcatgctcagcttgtttgtgaaattaatggtttacggcattggttttaggaggactgtggcttttaaagaaaagcctctgtatctgcttgaagaagatagcttgcatgtccgtgtgggcttaatattgaaattatatcactttgttttggggccaagtgcaaccacctcctagcactctctggcaactttttccctttccctagaaaaacaaaacaataaattggttctgaaagattttggtcacctgttttagataaattaatattgccactaaaagggtgacttttccatgccagtaggaattccgaggccaggtgcagtggtgcatgcctgtaatcccagccctttgggaggctgaggcgggtggatcacctgaggtcaggagtttgcaaccagcctgactaacatggtgaaaccctgtctgtactaaatacaaaacaattagctaggcgtggtggcaggtgactgtaatccaagctacttgggaggctgagacaggagaaccacttgtacctgggaggcggatgttgcagtgagctgagaccatgccattgcactccagcctgggcaacaagagtgaaactctgtctcaaaaaaaaaaaggaatcccaaaaccattaaccatgttgctcaagtgatctggagtgagatttagaaatccttccagattttgaggtgtgaaaactccatgggtgcccaagcttctgtgtacctgtgctgtgcagcacctaaagattataaaaggttgggttgcagtgtgtccacattcatctttgcctgagtaataacacccaaaaatcctgggtgttatttcaattttattacatccagcattctgtgctggaaaaagcccaaaagatgaaaaatcytataaagttttcacatgaattcaggacatcttctccaactctagaacacggcacagtatgtgagaatttagtttctttttccaaagcttgtgcgtcctggagtatttagtgaatgcacacagaaaaccaatgtgccttttaagtgagatgttactccaaccgcatttctaaagttacgttcaacataggctttagctagcaggatgttttatcagtcgtcttccctatcttgttcttgtgtcccattcccctctcccctacccaatcccgattcacctcagagagcttcaggaagggaagtggcacctttgtgtcctgggaggtttaggattgcaactggaggatgtgggagggcacaatttggaccagatgactttggaaggtcttccttcacctcagattgtaggactttaaattctgaagattcctgctgtgccataaatcctgcttcactcttcccaccaccctccttcttgagggaatctccctactcacctcggcacttaagtgggaaatgcaaccatgtaactccctccaatgttggctgattggaccctggagttgtcctctgacccagtgcagtccagctttttggtggctggaactgtaattctggctcagaaaactgagctgcatcaatgagattcttcagttcatgttggaaaacagagtcactgagagtgagccatgttaacagaaatcaaaaaaatgcgtctgtggcaggagggcgaggcggaagccttccaggagtccacatgatgaagcaggaccaatgttgacagggagagggtgctgttgagaggataatgcattcctccacaaggagaggcaccaccctgacagaattagggtgcagtggagggcctgatagagtggaagacacagatagaactcctgcagcctggagagaaagagaaagtagctgctggagtttctggcagctttcttttcccagattatatatcctttctcacactctggtcttgcagtatctaagtactctgttcctatagtcatatcaacatacttactaaaatactagatactaaatgcctatcaagaaaaacaagtgtattaaatatacaagctaaggaggagcgggcttgtcctttaatatcctgtccccagattcatgaccaaggtactcaatggtcttgtcgtgatgttatagtacatggtggggaggttgaggtggggaggggaatcttgccgtcagactccagaatcccaagggcatcaacttaggaaccacctctgcccaagccccttaatatcaaatgagactactaacagcctaatcccaaatagaagtctctcttcttaactcaggaagctgcagttctgggtccctgatctctacctctgaggccatctaatcattcgctcctgctaacactagagatgtacccagaagaacagcaatctgtccagtatggtcaatttcaaaatccttctacattcttttaaataaagtcatcagagaatggaaaattggtcaactttgtaaaaagagatttttgaaatatgggaattgaagtgttaactatattactttaatttctgtgtttctttaaaaatagtatactgagcataactgaatcttcaagtgatggtgcagggttagtatcttatgtattcatgatcctactatgatcttaatacaagataatacatgatcgccgctaaggtaaatgtcctggaggcctttctttgaccacgtcaggagaacaagagttgcctctgaatcacacattggggttcagacttgcaacttaaccacatgtaaggtggttgactgtcctgagcctcaggttcctagcctgtaaagttgcggcagtaatagctgatggcttctcagccttactaatgcacacatcacctgaggatcttgttaaaatgcagactctggttcatacctgggatgagacggagactctttctcacaagcatccaggtgataccggtgggctgttggaagagcatgctttgagcagcaaggtcttaggataggtgggatttgtacaatgtgtggtacaaagtagctgaccaattcgcaaataaataactcctcttttctatttatctttgtcttcctgctgcttttatcagactgctgcctgtcactttttgctactgtaggtgcctagttcagtcaccctcattcctactttgatatttgcagaccttgctacttctaatctctgccacttagccccaagagccaggtaaagctgtggtgagcagtgggctctgagaggaggtgagaggcacagtgtcttcctcgtgtcctgctgtcctggtttatacattcaggtgcccctgggcagtgtgatcaggagcatagacttggagatagatggctgggttcaaatcctgactgggccaccagctgcctaaggttgggtacattacttagctggkgcacagtaagtctaaatacatgtttgctgctcttactaatatcattattggggccagataggaaatgctgcagtgggaattggtggggatgtgagccagggagttctatcctatgaggaaatggaaaatataagcctgtccaaagatactcaaattctaattcttagtctatgtaagtggttggcgaactctagactgtggaccaaatctagcccaacatctgtttttgtcaattacattttactggaacatggccatggccattccttgtccgtggctgcttttgcactaaaattatagagttagataattgtggcagactgtgtgacccacaaagccttaaaatacttactctctggccttttctgggaaaagttttctgacccctgaattatgccacgtcccaagtaaaccagctctctctcagaacacattggccaacagtccctggcattgatctcatcagaggtctttcagggttcttgattgtattcttctgtatgattgaggctggtggatggccaatatgtggaaaagtgaagtgtaacttaactgaaatcctgatcactctagagatggagctccaggcattgagcctggtacctctttgtaggcattcagcaaaagctagtgcttatttagtaactaatgcattgataataaaggagtcgtgaatctgcacagtgtttctgcttcttggagcccttcacagccatcatttaaggtggtacaggctgatgccttttaaggaagcaagggcagctattatcttccttaaccatcctggtgtgtagatgaggagctggctcaaggagggggagtgacatggccaagtcctacagcacatgactggcaaagccagaaccagggtcaggctctgacctctcctcttggagacttgccttcctgctgccagttgttccatggagctgctccactgccactaccctggagggagtgagtctgtggttacagcaggattctaaagctaggaaggaaggtctctctgggtgagctaagtgtacagcagaagccctgagcaaatactggcatcacaggtaaaatgttgctcctggctgcccaccgcaggatcgccaagtcagcgacagccttgcagccagttctgtagagtgagtaaataagcctgatatgagcatttcaaatagtttccagctccagaccctagggcctgatgtggtccagccctcgcctgccttggcaacaaccaaagtcaaccagtcttaactgaatttgaaaagttcctttttatctagacttcaaagactttgtggttttaaagcatcccctgaaatgacacatgatccctttcctatatgcctgagaaatcaggcagcagaactttcagaaatgtgatcccacttcccctgctcctgcccttttctacttcattctccatacagcagcagccagagtgatcttttctaaaatgcaaactgaatcgtgctactcctttgctcagactctccaatgacttcatttcacacttagaacaccttacatttacagtgaaatccagtctgggtagtgtgttttagcgaggctctctgcaagccagccactcctgctctgtacctactcctctctggctcctgggctgtagccacaagggtcctgtgtgtcacccattccaccaggggccaccaccctccttaatggctgctgcctgtcctgctcaccccaactggagccgccaagaccaccctgttccacacttgtgccctcagccagatgtcacccctccccctccctagcacagcaccctgtttattccctttatatcatttgattcatcttgtaatcatataattatctttttttgtcaatctctcttccttactagactatatgctctgtgagagtaggaattgcacctgctttgcttacccagctgcctggcacgtggtaggcactcggaaactacttgatgactgaatgaatctcccctaagtttagcttaaattactgatttatctgtggaacttgggatacaacttggaatgccttctgcctagaacatttccctgtgttctttgctgaccccagggagaccaggaagagggagtctggtagaaaaggaacagagctacacatgcaaattctacagaccacatagaggcttcaaaagtttttctaaacctcttgtgagattagcagggagatggatgggaacaagatactgcacagggaaatgggaacctggctctgggccagctctgctgtcatatgattgggacaggccactccagcctcagtttcctcacttgcataaatgaaggtattggtttaaaaaaagaatgaattattatacacaacaacatagatgacttcaaaataagaggagcatttattctgtttgattctgtatatattatacatataaaactctagaaaatgcaaaccaatccatagtgaccaaaaagaggtcattggttacttagggaggggagaggaggagagatggatatgtttgctgtcttgggtgtggtgatagctttatggtttttacattgtgtgtgtgtgtgtgtgtgtgtgtgtgtgaatgacagacttttatgtgttcccataaagtctagaaatttgctatcttatcctttacggaaaaaatttgatgacaactggataagatcaatcattattcacctgtgtgttttcagagccctagggtctgctattataggaggtcraggagcagccacacaggatgggccctgtctcaacagagcagttctaatatatctgtggcatagatttggcttttggctttccagtaagatttaactggggaaaagggtggttaaagtctcagactaggtgactgctgcatctgagatagaatcccattctgaaaactatgtaattatctagcttgctaatttggttgacttgggcttagtttaaattaatgcaaaattgggaatgggagtcatttggagaaatgccattttatttcatagtaggaattaactgctcttagctcattgttttaatgaaccacccaagacctttgtaattaaagaatgtactgaaacccttgaaaagaacacatttttgtaagtagattaaaccttgtcattctgttttgttcttcaggctacttagccaagcttctctgcccagatratgtagagataaataaaccagataaatttaaacccaccctaactcaaattggcatatattttgaaataacaaagttagaatcagttttgttggatttactggaaagtctgatgtgatcatagccatttgttctggttccaaccagaagaacattaaaaattagaaaataatgtgtctcctgcttatttcccctggggtaaaagtcagaaaagatcttttcatgatcccttggagatggcgcttgccagaggcagggaggagtgtaggcatcagtggagatggtgagcccccaggggcagccactcaccaagccatggttacctgtgcctgttttgtgcctagcacatgataaagggcactcacatcacagagcctgttctctaaattcaaggataagattggaataggcaagggaggaacagaggagaaataaaatgcaaagggaaacatcagaaatgaatcattagcttttaagattccaagagccatgatccaggaaccttaaggatttattttaatgggtgttggctgcatgctgactataacataaccccatgtggcatcccctgtgtaagygtgtcagtgtttgctaagtgtatgtgagtaggaataagtgtggaactaggagcccatgggacccgggggtagccttacccgatgtcatcaccctactggtccattccctgtttcagcaagctttatgcaatcgtcttagatccatgaggtttccttgtcacacattcttcttgtacccatttcaacccagagacactgattggacatggtgtagaggagttggaggcggcttgggtggcaaaggagatgcccggattctcatttccgttgagccatttattgggtacgtgtcctctgaagtcatttgccctctgggtctcactttccttatctggcagccctcccagcagctttctgaaatctgtgaggtttcagaagaagcttttgagttgaataacgagttccacgttccaggccaagtcatgctttcagtctcctgtttaaaagtctatcaagttttggggcataagggtgggaggaaaataaaaccaaggcccctttgtcagcatacagcttcagtagataccccaaattcttgaaatctgtatagcagactgctggttttttctccttgtcagagcccagcccactgacactttacagttgacagcccagcccagatatgggccgctgtggcttctatcgaatcatgcttgggattgccacagttttcttctttggattggggcttgaggtggttgggaagaatgcatgccaaccagccctgcatctgggacttggagcctgtcagctccctgctctttgataatggaatagtctgtggacttcttcccatttgtgagagaaaactcccccttagaactcaactggtagagcttctcatagcttacagttccaagcaatagcttggttgtaggtccaggcaggactctgacatggccctctggaatagcattgatgtgttgggttctttgctaagatgatttccagtctgtgttccagggagattcaggaaagctgaagttcattcttagaacctaggtctgtgtttgttgttttgttttgtttaaaaaaaaaaaaaaaaaccttgcctgatcttaagtgccagctgggaacttgttcagcatccacatgccagggcctcttgtcaccctcatttagttagaatttccaggggagggaccaggaaatctgtatgctccaacaggtgctccaaacaggcaggcttgggaaatgctacactaggtagccacccattttccttgttcagaaaaaccttaatctcttcctgtccatgtgtggtatatggctgccatgtagccagcaaccacatcaggctgtagaagacacttgctattcctttgttttacctcggttgcatccagtgctccgggcctttgcttcccagtacagctgaccaaccacacggcttccaaggacttgcccccttgtttccatgataacagccaatcgcataaatccatgtggggtgcaaaacatggttatgggtttcagtgatatatctctcaagaatgcttatcttttaacccaggaatgcaaataaaaatttgtatgaattttagatctcttaaagcactgtctcgtagcctcttgaagcatgtgtctattttacaggtgataaagcctcagagacatttagaagaaacagtccacctttaggataagtcatactcttctcagtgtccctcctttcctgtgacctttacactgtagagctagagcaggccactcatggtacaaatgtttgaatgatggatgatagaatcttaggcctttgtcgaaggtggttagggaggtgttccagaagcctgggaatggagagtagttttcttggtgcccccgcatgaaaaccactagccagttgcttattgcgtgggtggctggcagccctcccagcagcataaacagctaagtgcaaatcactgcagctgtgagaagaaaacatacaagactgctgtccatgaaaagaggcccttggtgctcagcagagggtctcctgcgaacgccagggctggcttgggaagctggaggctcaggcagccagtgaacatcctgagggtggggcacttctggaaggttccaaatcactgccttcctgctccaatagtgctgggatgagttcatttgtagctcttagtaaacacagctgttgtggttgtaatttgcctggaggctttttactattactccaaccctaacagtttggcagccgatatgggagctgcggtgttgagggatgggaaaagaagttgctatctgagagcaaagagagatgggtggcagctgcccatggacagaagccaccaagcaagtgcaagtgtgtggaagctgttctccatggacaaggaggaggcagcgtctcacatagtgacccaggggcctttggtgcccagaagatgagcagtacagggagagaagtcagaggacctgtgtggaaggctgttagaaaagcattgcaagattgtttccctcaagtgaggaaagggttgacagcgcgttcttgaagggagacagaactgtaatgcctctgaatttgaaacagtctgaaaggcatggtcttctgaatgttattgggcacagatttataagaatgaggtaattgtgttgattatgcgattttccacctaaatagaaccttattaaaatayagcttgtaggaaaacagagtttggattagatttctaggcatagtccatattctaagagcatggtgacaaattgaggagatagacctatactggtccatcccagacagcaggttgctgggctggcaggagatcgcctcactgttcaatactgagataccggggtgctccttccagtgttcccacagagctcctcgtggcatctcagccctcctgaggcagtgcagtccaggcatggagagacagtcaagggcactgccaccctcccaactcgatgaagccttctcagctggggaaggagaactgggggcttcatttggttcaagggtgaaaatccctgaggttgctccagcttcatcttgggagaataatgttcattcctcgtcaacactgctagaggttcagacacaccaaaaataggatgccttggaatgagttctctatggtccttatcaaccattgtttaaaacatcagccaatggagcaaaatcacagcagtagaaggaaacagaagtgtgtgtagatttctgccttttacttggagagaaaagcaaagttagttgtatgattttaaaatggaggtggagaagcaaatcttaaatctgggaagggtgggggattcatataagccagtggaatgcattgggccagttgaaggaagtctgacctctttccggtggctgtttacacatacacaagtatatgaagtgttagtatggatttgcacctgggggcttaccatgccagttggaatacttaaatttttgatagacgtgaaaatcatgagatttaccctgtggaaccttctacatcagtgcagatccatgtcataaacaccttgaaacataggccctgcaagaacagagcttgttgatggagttttatataaaaaacacagattgggagcagactttacaatgtggaatatttgttggaagcagatttcaaccttcaattgcaagaaagggtattatggcattgagaatcggtgataaaccaacttagaaattatttttaatatatttgcttctaaagtcatgtttagcatcgatacacaattctttacttaaataaaaatcatatatgcagcatatgctcaaaatccagcggtggctgtgcagccctcagtactgaacgagtccatctgcagtcaacataatcaggactagcccgggcacagtggctcatgcctgtaatcccagtactttggaaggccgaggtgggcagatcacttgagcctaggagtctgagaccagcctgggcaacctggcgaaaccctatctcttctaaaaatacataaattaactgggtgtggtgatatgctcctgtggtcccagctactcgggaagctgaggtgggaggatcgcttcagtctgggaggtcaaggctgcagtgagctgagatagtgccactgcactggataaatcgagactcttgctctagtctcgagggacagcagagctccagggaacgctggagttatccctgctcagttgtaatttgtactgctggccagcctttgattctctccctcttgattctgtttttgatagattgagctccttgaggagatgataatggctgacattttagtgcttcctgtgttccaggcatggccttcacaatgactatgaagtaaatrctattattaaccccacttttgagtgaaagaactgaagcagatagaggtaaaggttcctcaggtggtcaggatttgaattacatcatgtattgtagccaacacactggactacaaggaatggattctctcttggtaatttcctcctctgtctccaacccatcctctcaaatcccaaaagcctaaataaatacatttatgttggtgtggtactgatttcaaggaaaggttctgtacggttctgtgtggaaacctgaaatccactatgcagagtagtgaaaccgaaatgggctacaactgtttgcctttgttccaaaacaagtgaaacaaagctttattctaaagatgaaatgtgttggttttcagttttcactgcatgtgattcttgtcatccagaaccaattattaggaacttacttgcgtatcaggacttcaaaagatatgtctgcctttagagagcttggagagcagaaataccgacttggtcaagggaaaaatgagggaaatttttaaatgaagttaaaaattgggtggtagagcatatctcttgagcccaaatgggctttaagggaaaaggcaggagtgattgtccacatgtgggttggggggatttcatctcacttccctaattatgtcagagcacatctcgtcaactggagagggcccagaaagtcagtagtgctggctttcaccaagtattttcatcttcttccaggctgctgggggtgtttcatgaccacagaggtgagagtcagtacagggctgccccagagggtcctgcaggttgtccccaggcactccagagagtaacattgccaccataaggaattagtagagcaatgtacagccctgttgatccagaccagttagtgatcttccaggttctcaaggcgtgctaaggtttggccaggcctccagatggtgccagcacaccgacaatgaataatgaggagcttcccaacaaccctataaggcagcagcactctctgtgtttttccaggaggaaaccaggctctgggagatgtggaattttaacctattgcctaagagagtcttcactgaaatactcaattcaaacgctcccttttcattctttctctttctttccctttctccttttctccttcttccccttccctcacttctcctccttcctcttccctccttttctttaccgtttttaaaatggatatcatttactggagatacacacaatttgtcctaaattgtcctaaagacagtgtctttttattttcttattcttaatgataacgtttacttcgaaggagttggcaaatgaatcatttaaaccagtgacaatgtaagtaacaacttgaaggagaagcagaagtttaaccactttcatggaccgatccctcactatttggaccagatactcattcctcctctgtgacctctaaccccagcatgcctcctgtctggaagagccttccttgctgttggacctaggggaggaaagaaattatccctcatcctcatgcagtggctcagtggaagcagctgaaactagcaggccaatctttatttctcagctgaggccagagaccaaaatattgaattagccttgtttatattttgtgacagtgtgctggcttctgtaggaccgtgatccaaggataggccccctgaaaacggtactcatttagcagccagggtaggtcttcctaccagcaccatccaagatggtaactcagtaggcccagacaaatcctactctgccactaaccatctccatgctctgcccagatcctttcacctacctaaaccatgtttttatccttaaaacggtctcacagcacttgttcttcctagctcacattgttgacacagggatcagacaagagacaggtttgaaaattctttgcaaactgtcacaagctagtcagctatgtctgggaacctgtttggataaattaaaagtgtgcccagctataattagcaaaatacctcacaaccatgaagcaagagttaacttttctcatgtaacacagtgtggggtatggggctggtttcttcactggatgtctgcaaagacccaggccactttggtctctcctttggcatccctcatgcattggcttgccaccatagcgtcacaaggcctgcaggcctcatagctgtggtctaagcagaaagaaaggtgaaggggctggagccttttctcaagaaatagaagcttctcctaaagcttcccttcctctgattctttccccccattatttgacctaggtcacatgaccattcttggctgcagaggaggccaggaaagttgggttgggccaattgagattggcttatcaatcaggattcaatagctgtgtcctcaagggtacatgattctagtaacaaggtagaaaggaagaaaaataagttttatgaccacggctcctttaccttccggtttctttctgtcaaagtcacacaacacttacatggacaaaggcaatgtaggcagtggtcatagagatacaggagatagtttatgtcttcccagggccctgctttccccagatgatgtgacttggtctttcaaaggactcccaccatcaaaactattaactcttttcatgttgagtactttttcctcacctgtttttccattcctgttagccggagcaaaagggcctccaactcctcttttagagagaaatgactaatgctcatactagcagataccagacgtgtccaaggaggtaccttgggcttaattccagcagttctcaacagagtccacgtggcatatgctatacccagcatacctagcctcttctgccagccctgcttagaaggccttcaaacacgttgtttcctggccttggcgtggagggtcagccagtgtaccagttttcagtggattgatattcagctccaaattcatcgtttctaattgctcagtgaaaacggatctggcccctggaagtatgttttctttggagctggcactaaagtgttgtcagtagaaggtgtggaaagatgctacaggaggaagtgttttatatctggttcccgggaaacttcttctacagcatcaggatcctgccgccccagcactagaagtggggaggtggagaccgtattggggagcagaatgtgtgagctcaggactttgtgactgggaggcagagcccatagcagggttctcatcttttataattcttctctgtctgtgctttaccttccccagggtcagatctacttgacaaggcactcaggrgtagaagtgtctatcaaacccgagaggcagaatacagttaagagcatgggctttagagacagaccggaatttgtttccaagctgtgccatttactctctctgtgctcttttactggacatttaactaatctaagtctcagtgttctcgatcgttaaatcagaacactaatcatatacaactcacagggttatctggattacttttttttttttttttttgagacagaatctcactctgtcgcccaggcttgtgtacagtggcatgatctcggctcactgccacctgtgactcccgggttcaagtgattctcctgcctcagcctccctagtagctgggataacaggcgtgcaccaccatacccagctaatttttgtatttttaatagagatggggttttgccatgttggccaggctggtctcaaactcctgacctcaggtgatgcacctgcctcagtttcccaaagtgctgggatcataggcatgagccatcgcgcctggcctggattacctgaagtgatgatatgtgagagcattcagtgcagttcctggcacatagtaatgattatgttgtggctgtggttgaggcccccggctttcagtgggtgatgggactggataatttgagtcctttctactctaaatcctcatgataacatggatgtctcaggccttctggctttttctcccactttgtcttctcccctgttcttccccaccttttgcttatatcagttctttctccctatgtctacacttttgctgtaatgaattaacagttgtctgatgaaacagtttctaaatattttcttagtcccttgcagaaacgtgtgtacttttgttctgcatattttatcatcttgtgatgacttgctagtattcccgtctccaagatcaaatattcctttccagctttgttcttttaggaataaaataaagaagtgttattgtggccagtacccaaaagataggtgagtcagagctcaggaatagacacagaggtcttagtgtaagcgatttcttgtccttgctaggaaacatctgtaacttccaatggcttccctttgccagctggataaggagttcaaagaattaagttttaggcaggcacaccagcagatggaggcagcccgccagcacctgcaagcccagagaaagtggttctgtgggtgagtgctgcctctgatgggacagaggtttttaccagcgagcgatcatggctggactgcaggcgttatgagggcaggcacccagtggtcttacatttgtatccctggtgactagctaggcctagcctcaggaggtacaaaatacatatttcaagagaataaaatgtgaacgtttggatggaagtcagccagtcctaggagcatgaagtctgtttcatcccctcttgataagaactctggcatttctcatggacagggacaaatcaagtggtttgcatctgagagctgtgttcttgtggcgaaaggattaggccatggctctgcacttgttctgattctgtcacttggcctgtggccttgggcatattttaacttgtgtcaacmcagttttctcacctgtaaaacaagaatgacatgaacagtgcttgggtcatagggctgtagaggtgagatgacgcatgtcaaaaagtgcatagtatagtgtctggcatgtagtaagttcccaagaaaggtttgcttggagattcctttccctaagacaaggagcgtgttgttcagacttagagatttttagcactaagggtttaagaggtcattttctggtccagactctccccatcctgaatttcatatgttaaacaggcataatacttacctcatgggattgtggaaagaaataagctagaaatacgcacgtggcatagtttcttctggagcatagtaaatattcaaatggtagttactatcttttatttgcaccacatacttattgcactgaagttagccttttaacggaaaacagtggtgtcagtctggcccagctttatgctgttgttagaatgcaagtgcaccctttctggcctgttgtgatgcaagtggagtggttaagaaaaagggacatggattataggcagaccctctccctctccccttgccacccagccttgcagtcttgggcaagccacttgtctctgtgagcttccgtttcttcatstgttacccggcaggttcactgtgaagctctcatgagagaagagtataaatactgataccatgttggaatggtagccctcatttttctgattatatcttaatttagtattactttcactgtcctgcttatggtcagatattgtcctgtttagctctcttatttctgcccacccaagccaagttggttatattcaatttgtaacttaacagagcgcaagaacctggtttcattcattgacagtacatacaactgtagagcagacactgttgtaaggtttggtaatgaaagagtaaacacgttgtatgcttgcctttatggatctgatactctaaagaggaaaaagaaggtaatacaccattaaattcatacatagtgcagtgatatgttctatgaaaaataaacgtagagaaacagaatgacagaagttgcccccctttcttgctctttttaaaatccacctacctccccccatcccaaattccgatgaagtccttgcatatagaagagcccatgcaatcatttgtggaaatgaattctgaactctttgaatcatgggaagattgaattttgcctgattataatgactattatagctgggtatggtggtgtgttccttcagtcacagctacttgagaagatgaggtaagaggattgcttgaagccaggacgattgcttgtattgtagttagccatcatcatgtttgtgaatgcactccactgcactccagcctgggcagcatagcaagacctgtctcatagatagatagatagatagatagatagatagatagatagatagatagatagataagatagatagatagatagatagatagatagatagatagatagatagatagatagatagcctgggcaacatagcaagacctgtctggtaggtaggtaggtaggtagagaaatagacagaccagacagacagacagaccagacagacagacagacagacagacagacagatagatagatagatagatagatagatagatagcactccagcctgggcaacatagcaagacctgtctctaaaatagatagacagacagacagacaaacaggagagattagccagagagagattagatagaatcattatagttccaggaaagggtggttggcttcctactttccatggaaatgcaaacagttttccaaaatcctgcccaggctcttaaatgcaagtcttagtcttagcttcttcaaattttgtaattggcttttgtggacttggtctttaggtttgttctctaaatcatttcaatttgtaattctttagaagttgatttttagctgcttcctggaccctgcttaagcatgaacataggttttttatggtaaaaatacatttgaaatgtatattcttaataraaacaaaaattatttttctaatagagcctggttatatgaaacaagtttgggttttcaggaattgagaagtgtctgaccccattcttaatgctacccctggagctttgctatggttctcagccaagctgttgctctttggaatcacccggagagccattaaaaccccagtgatggccaggtacagtggctcacatctgtaatcccagcacgwtgggaggccaaagcaggagggtcacttgaagccaggagtttgaggctgtagtgagctatgatcatgccgctatactccagcctgggcaacagcaataccctgtctaaaaaaaaaaaataaagtcytagtgcccaggcccagccccagatcagtagatcagatctctgacattgtgatagaagctccccaggtgattataatatgcaacaaaggttgaaaactgctgttctggagacttttctattgtgtcgaaataggaagwctgaggctgcccagaatgcttctttaaagagtgtttttcaaatatcgtgtgcctgaaaatcatgggtggaactcgtcaaaagcagtaccacccttagggatttggctacagtaaagctaaatatagggccttaggaacacgagtattctaggtgatttgatacaggtagtggaggaaccaaacttaggtagagcttttaagcctgtacctccccagctaattcttgggcgttccaggattgaacactactgtgaaggtttgggagtagaccagaagatctcttggtggacttctacttctcaaagtcctggttgcctacttctaccatttcctttgtcagacctgctgaggccaacagcccactgaacattggggcggccagactgctcccaacagataccatgaatttctgcacccacagcttgagctgtgtgcacatcaaatgttgagagagtttactaccaaacctgtttatgccacatatttgtgttgtaattatgtagtatcattaacacataaactgatgaaatataaatgtgaaaagtaagagcacgcacttctatataaacttagttggtagctttggaaagatttgatagaggygagtccttttaaaatattgctgttaaatttggggtagtcaaggtaccagtaaaataatggggaagttcacaaaaatgtggagcctgcatttaacttgctctgcaagtatttttacacttacctgacattttaaagagatttcagagacagcgttatagttttatggtaaaatgttcgtgatayatgggtatcactttttactttgcctgcatcagaggattttttctattagttcatcacctatttctccctcttctgaataaaaaacaatgagcaatgatatctgctgtggttaggtcagactgctgtgattagccattaacatactcacctgagcatttaattttctgcttattatttaaacaatacacaatttaatgaactttgtatttttcttataaaacgccaaatgcytccaatttaaatcaagcactgaaaggagagtattagtcaagtactttattactaatctagctattgaactgtacttcattgaaagatttgcttttgaaattgttttgttcctgctggctgccccaggctgttttaaatactgctgttgtccacttctgcagctggtatccacttgtttttatattaataatacagggattaatctcaaagctctaaatcagtagttcacaaactgcagcccacatacctgtcacctgtttttgtatagccaatgagctaagcatttttttttttttttgagacagtctcactgtgtcgcccaggctggagtgcagtggcacgatcttggctcactgcaagctccgcctcctgggttcacaccattctcctgcctcaggcgcccaccaccatgcccggctaattttttgtattttttagtagagacggggttttaccgtgttagccaggatggtctttatatcctgacctcgtcaccgcctgcctcggcctcccaaagtgctgggattacaggtgtcagccaccrcgcctggccgctaagcatggtttttatgtttttaaactattgagaaagaatcaaaagaagggtatattggacataaaaattttatgtaattcacatttcaatgtcccataaagtttcagtgggacacatctaaggtcatttgtttactactgtctgtggctgcttttgagcatcagtggtagagttgagtaccatagggacctcatggtacacaaagactaaaatatttattatccggcccttgaaaaaaaaaaaaaaagtcatcatcctctcatccagatgtacgctgtgcccaagtcctaggccttttctctctctctctccgggcatacaatgctcttgcccctacaagttccttcctgtccactatcctttttgattgagggtttgtttggaaactgcctttgaaagtaaatgtgttgaatgtaactggttcagtttttcagggttctttcttcaccggcttcattggagccaatcccctttgtacataagaaccaaactcctagttcttactagaactgtgaaccacaaaatattagtaaaacaaagtctcagttaaaaaaaatatggattctttataactatttgatttttacaattacacatttaacttaaatttctcaagttcacatttgatggcaccagaagtacacttacctttcggaagtttggtgtacragcatttatgctatatcatgatatctgcatttctgaaaaatcttgaaaactacagattcaaagtgatagaatttatgataaaagtaagggccaaaccactgcaaatcaaatctacacatttttgaacaacagcagttataaaaataacaatccaaataaaaatggtagagtgaaaacatttaaaagctaaaaagcaaatactatagtaaatatacaactttacctttaaaaaggtcaaattagcatgctgggggtgggaatggtttgaggctacttttagtttagagaaagaagggtaagatgcacctgacctttcctgatggaagagaactccacagaagcatgtccatggaagagccatggctacacatactgggctggaaactagtcatggtatacagtactataccctctgcagattactacctgtagctgagtaaatgtatcttatattaagctgctgttattgattctacaaaataataatgtgctggagaaaaatggttatgaaccaaagtgacttacatgttctgtttacatcatttcctacttatccttcgtctatgagataattgacattagagaaacacacattttagcagaacccactgtacttctttcttcattctctgagtctatctctccaagtactgctatgcattaaacagcaatagcagcaaaacctgyctcataataaccagcaaaaaatcaagcagatatcaaataagcattaaaaatttcaggtcagcatttwtgtcaagacagcatgtatataccacaatatatattaaatccaaagagaaggaagaataaaagtgtgactagaatgtccttagtcacttaatccttcttgtgccatcaaaagcccctcactccctcgctatggctcctgacttcagaagccctcagctgctgattgagtagacctggggtgttcaatcacaagtggagggcagaggacaacatagtttttaatgccaccaaaattcgaggtagtaaggtaagtatggtttttaaaaggtacacacgtaaggttggatatttataaatacatacgaaacatayatagggcatgacaattaaaaaatgaaaagttttgacaatatgacactagggaaacataaagccactgaagataatattgggtatttttgggaggaggaagaaatgcagatgattaggcttgataaatgcttattgaaaggaagatcgatttagcagggtttttttgtttgtttttacttagggcatataaaataaggtcatattggttctaatagagtggggaaatatggaacaactaaaaagctgtgctaatcaacagcaaaatctcagatggtgagataagatgtaagaagcaccttgttatccggcggaaccacaacacagtaagcactggggacattttgatccggtgacaaattctcaaaaaggtgtcagggtaaaaattttgatgcagagtaaaataatgtgttattttaaggtgtgcgaaattagcttgcagttggaccatggaaaaatcacttaagcatcaggatgagaagctgtcagaggcaaaatacgaaatatttgaaccaaccattgataggaaaagcaaaaaacaggaatgatgtcagagaagttagaagaaatgtcrtttaaacaagagactacatagaaaaaaatcaaatgttggcattaaaatttccggtagtcagaacatgcaaatgggttggtgtatcaaattaagaattacattcaaatgtgaatattagattaaaccgtaaaataaaaaaatctcttaaagaatttcctttttctcttaaaatagataagtaaatcgcactgctttagtggtctgttattagggactccagctgcttctgtctttcaactgtcatcttagtaattgcatctgccctcagaggcactcttggtccaagatggctgctgaagctctagccattagggcctcaattcacttaggaggcaaaagcaagaagtgaaggataaaagagtgtgtgtttctctgctgaggcagccccctctaaagagctttctctgaagctgtgtctagtctttasctactcctagttactagggagattaggaaatttcaactactattgctgccccaagaaaaagtgagattctgttcataaggaaaaggggatatctttgcattagataaaggggtagagaagtagttctatatgcttaggaaatatgtatatatgggatatctcaaaatarggaaaagttggagtgaagattaaaatagaaaataacaaaatgttaacacactaagactacacaagagaccatttggccagataaaagatatgtatgagccgggtgcggtggctcacacatgtaatcccatcactttgggaggccaaggtgggcagatcacctgaggtcaggagtttgagaccagcctgaccaacatggagaaaccctatctctactaaaaatacaaaattagctgggcatggtggcacatgcctgtaatcccagctactcgggaggctgaggcaggagaattgcttgaacccgggaggtggaggttgcagtgagccgagattgctcccttgcactccagcctgggcaccaagagtgaactccatctcaaaaataaaaaataaaaataaaaaataaaaagttatgtatgatatatatatatatatatatatatatatatatttttttttttttttttttttttaccaaaccagcacagaaactagatttcatagagtattggttaagaactgtgttccaatcctggttctatcggctaacttattagaggactagaggaccttaagcaagtttctgggcctgagtttgtctgtctgtaaagcagaaacaggagtctattctacctaagatcgttgtaaggattagctggaatgaggcaagtaaagtcttcctacagagctgagcacacaggaggcaacatgcccactaacatggctgagccattttccgctagaagttcctgcagctggtaacaaaacacctagcaagctcttgctgcatgctacctcatgttggagggaaggagaagaatcatcattctaatgacttggttctgaacagcacaaaagagtttggtgaaggggaacaaaaaaagacacgaatattgggagaaagctgcccatttatagccacagatggttgagtattcaaatgtgtacccaagagctccaaagttcagtgatgggaatttgcctctcaacagaagactaagaatggagacctccaatggaaggtgacttataaggtgattgttaaagaatcagggtactttccacatgtaattctttgatgacagctcttctaataatgagaagtcaggagactccaaaatctccagctaaaattcatggggatcagagccttggattttagaaggatgcacaaaagatgagtagaagggaggcacagaactaacatggaaggtccctaaagctcaaaattgccacctcttcccaaaaagtcaaggacaatgaaaaagaaagtgttctttctctccactttgagtatttgaaagcttttctcagaataaactgtgatgactctttttctttaaattttgccacgaaacatttctaataaaagaattgtataatgagcccccatgtacctctcacccagcttcaccaatgatcaactcacagccagtcatgtttcctccttatctgccctccgcccccagaatattgtgaagcaaattcaagacatcttattctttcattattaaagtatttcagtatagtatgtatctctaagatatgaagatctttaaaaaaaaaacccactgctattacacctgaaaataattaacagtaaattttttaatattgaaatatacagggttcagatttcttagattgtctcgattttttcattttatttaaataaagatgcaaataagatccacacattgtgattgggtagattctttaagtgtcctttaacaggagcttatttgttataccaggttatttatcctgtagagttgcccacagtctaaattttactaattgcatacctgtggtcttcctccagtatattttctgaagttggtagatgagatacagcagcctgatcaaattcaggtttgatttttttggggggtgggggggtggtcggagtctcgctctgttgcccaaactggagtgcagtggtgcaatctcagctcactgcaacctccacctcccggttcaagcaattctcctgcctcagcctcctgggtagctgttattacaggtgcacaccaccacatctggccaatttttgtatttttagtagaratggggtttcaccatgttggccaggctggtctcaaactcttgatctccagtgatcggcctgcctcggcctcccaaagtgctgggattggcctccccaagtgcctgagccaccgcccccagcccaggtttgatttttgcagggctactttataaggggttttgaggtattggcatcaggaggcacataatgtccggttatcttgcttttttcttcatgttagcagccattaagaataactgcctagacccattagttcattagtacttgctagtgatagtctaattaagtgtctttatgaactcacttaatttaaatatatttgttttccagtccattgcattctatgctgacgagtaatgctatattgactagtaaatatagcttgtaaagactaagcttgggaatctctgaaaagtcatctcaggaaacagacctagacaacatctgcactaagctagcaccctctgtcttttccagatttgctccttttttaaaggaaggctgtttctcactttaatttttctaagtggcgtttagcctcagcctctgtgctactccatatgctttcccagctgaactatcagaccaaccagctagataggttccctggtgattaattttttcttggagcccctgaggcctgtagtcatgcacatatggtgtctaatggcttggtggataactgagttaatggtgtgtgaaggtgacctgaataaatttggaatcaaaactaatacaggttatggcaagctggtcccatcataaatttggagtacttgtattcttgcctaagtaagtgttaggtgactcctttggagagaaactatgtggtcctgagttcagaaattctgttaaggacacaggagaccaaatgcctcctcttgtgaaccttgtattgaacatgttcactttccctttctcacattcaactggagttcagaaaaatatcatcattctccttttacaattattctttctaarctgagaacgtgaataactaggacaggcagggcgttggtgtggtttcatcactttttcccaatccttcctgcagttttttgcaagccttccattccacgcttcagactgccactgggtcttcagtttgtttttgattgttggagccatgtcaatgaaaaaaggctgagtttgacctctcaatatatggatactaatttattgataaaaatggagagtagaataatggtatktatggtatacaaatattacactgtaaagaaacacattcctatttttttgtgcatccccgtggatcatctcgtgcatcccctttttgaggttcactttttagatcaggcactgcttgaggtgccagcaaaacagctaccctccaatcaaatcaaacaccaaaagcaaaatccaacttcagttactttgtttgtttgtttgtttgtttttttattatactttttctagggtacatgtgcacaacgtgcaggtttgttacatatgtatacatgtgccatgttggtgtgytgcacccattaactcgtcatttacattaggtatrtctcctaatgctatcttttttaaatcagaaaatatagaaaggaattatttttatttcaatatatgtttcttttgttttcagaaattaaagagtattcaaatcacatggcagaaccctgtaactattttaaatgtaggactaatccaaagactttaaccttgtcctatgtctactgttattttcatggaggagtctgtcttaacaaacacagatttatgtcacatgatatgtattctgtctgaaaacacttccccctaaccctcccgcccccaaatctaagtgaaatataatggtcactgatttttggtaaaaatagttgctgcagagttcctttaacatagcaagttatttgggcctaggtctccactgaagtgggccatttccaacctcyctgtatggtttcttttactggataaacgtctcttctttagcatcttttatgccatctctcagacttttgcctctctttgtcttgtttcagaccctaaaggtcttcgtttcttggactcctatttcttttagcatgtgtcaattgagcaacttcagatgctgttgatctagaatatctgatcaggtccttgccccactgaagcttggaatcaagtaagaggaggggacatattgaactctcaagcagtgtttaaccaggtgggagacagcaataagcagaggattagggctccattggctggggatggggattgagtgctgagagagttgaggaggtaggtggtgccgttagtgatctgcttgaggaaaccatccaaaagaggctaccacttggagctcttcaaaaggggtcttacctggggtggtgaatggcaggatggcacttctaagcaggagagagtgtcttgaacaaagactggaaactacagttagttagccttggctgagtgtttgggctgctgtgataaagtaccatagactaggtgacttataaatagcagaaatttatttctcacagttctggaggctgaaagtctgagatcagggtgccactatggttgggttctggtgagggccctcttctgggttacagacagccaatgtcttatccttacctggtggaaagagtgacctagatctctggtctcttcttaaaagggcactattcctatccatgaggacttcacccttgtgacctctttacttcccacaggcctcacctcctagtaccatcacaggggggataaggatttcaacagcggggatatgaattttgggggacacagacaattagtctgtaacaatcctggacgtgggatggacaagaaagacttggctagaatagaaccacaaggttgagaagtcatgagaagaatcctttgtagtttgagtcacttaaccacattatctcatgtgatcctttgggcctctccaggagggagggtggttattacctgaagagtccaggtgcaggtgggtgaaaccacttcccaagggcacatagccagcaaagggcaatgtcaaagtttgaaatcctggtttcctggctctgggtccttctccctttttcttatagacacacctctctatagggtgtgtcgtgttggcattggtaacagggcagagcttcagcactcagaagctgcctgagaaatggggaggaggacgtagaaagtgagagattttctgaaaccattgatgagtatgagacctcagctttgctttaccagtgtattttaattgttcctgttttcaaactgctgcttgcaaattagacacttcagctgcttttcctttcaaatatgtttatttgcagcattttagattggaaggtactctaattagagtgatcacttttattttgctatcttcatgtttttaagaaatcaggaatgaggtgaataaatttcaagaggcatgtgatttattttgaggagagagatggagaggatatttttagcttctgtcttaaaaatcagctcttcatttaaagcctggtggtcagctgtcctttaaagggaccttacgctgctatacctgaatcagaatctcaatctgtacacctcaaacacaaagagatcgtgcctggaatttagaagtttgttcttagcttggtgggagcaggggaaggaaggagcccaagagagtcttgtgttttaagtggcctggtttgtcacgtgtcaagtccccgcctacaacaacagcatgttgacactcggtattctgaggggagagattatgtgcattattaccagtggacacatccatcatcatgaagccatgggtattaatgcatatggcatggggctgagtgcctcagcaaggaaatttagcaagcacagccctacaactagagcttaaaattagaaatgcaccttagtgmtgtggcatagtggaaaccagcctatgctgtcccacccagaagggggcacccctgggtcagtggacccagcatctaggacagaaagccctttggtgagggatgggtctgccccacaccacacgaaggcattgcatcctctgaggtccatggtgtccccaatctcagccataactaagtgctgggtagagctctttcagatgcatgagccttggggacagcgagtttgtgaaagaatgtgccttcacataataatttaaaaatctcatttgtttccgtgaatacccacgtgagataatagggcaggtttaatattccttcattttacagataagaaaactgaactttgggaacttgccgaagtcccataagaagttagtcagagaactggaataaaaacacagattacttcattcttgaccccaaactgcctgctaaattttacacaaatatggatagggccccagaaaaggccagattacctcagatcagtgtgggagggctggcctgcctgtgtaaaggctatttacagacagagaccaattctcccctgtctccactctgagtaattaatgccaccccttctgtgagactgctggtaagagctgccaagcataaggatcttcaaaaagtcttgtctttttgaagcagtgctgtttaccctgcgtataattattataacaatgagagcttcctggcacattaaattatgtcttatttggagtctgtcatcccccgtgcagacaatgaagtcaagagctgggatggcaccagaaggggcattgcaacctgcctgaatctggctgtcctggtgtccccagagaggtgccttttattatctattggggcttcaaagagaggaacatctccaaatactactctagaatcatatgatttattattttacagtaaattaagcactgagtgaaattgtttcagcccttgactctgtgccgccatgcttctccacaacatggtggcctggtctcatgttttatgtaattcagaatcaaactaatgaagctgtcctggttgcaccccacccccacccccaccacctgctgctttggaaggatccagggagaagcacatgcatattgagtggagtataaactccttccttatgtgtggtgcattgaattcaggctgccctttttattcctaactttgagaggctggcaggaaggtaaggcccttgggatgaaaggtaaaggtgtrtaccatcccatagaagtgggccctgcctcacacgcctttttccctttctggtttcccaatgaaactgggccttctccactcatcccacctcccagatttctacataattactatatatgagacgtgcccattggagctgccaaatgtgattttgcagacaggtcttatctttctcccttggttgtaagataattacaagtagaaaagttggaaattacaagaaagcaattacttttcatcctggcctgcagaaattgtgttctgccagtcactgtgtgtgttcgtatttttatattttgcttcatatgaaaaaaaactttttgaaattaattttaagaatgtttcttgatcaactgagtaaagatcaattgacatctgctaatactgtcctttaacatgaatatatgaagagtattactttgatggaatccctcacagatttacaacagttaatactggaaaacacaaaatgtaatgttattccttactaagagagaccaatatatagatagaattctccccccttcttgttaccaagaaatacactaaaatgatttaaaagtattaatgtattactttatatttttcatattatttttaatttattctttactgatgtgattgggtggtacttggcctctgtggtttggttcctggcctttggggcctcagtttaattttcagaggaagscccgtcacacctactgccagtgtgaccatgcagttttccaaaattcttccctgacaactctcacaggatggtcctgtaataataggagacacttctcccttgcctttaaacagtatctggccaagctcatcaagctatctcctcctttcaggaaaggatattcagtccatgatttcctgaccctttagggattctataaaacatgcaatttcagtttgccaaggcaaaaccttccactgtgacagccctctttgtcactaaacagtctgttttctgtggttactgcccagataggtggaaaacagaaagctcttggaggagtttgctgacacatttgggctgtggtggtgtgttttcaacctaccagcctgttttctgcatggtagtatagctggtgggctttgttgctttaggaccatgccaatcagagtagatgaaggaacatcattatccgtaagtgactgcatttgcattgaggaaaagagaaaccagctctgcaatttgaaggcctcctgcccttcttaaagcagaaaggaggtcatgccaaagggtttcttgttttcataaactggctggtggttccccagggtcctttaagagccattcgttaaatggcagaaagctctgtgctaaggcagagaaaatcctgaaaaacaaaagtgctggaaaatagagacccacactgaccagttcggactgagagatgtagagtgggcataagcattggttccacatgggcagtgatgtgaagatgctagccagctcaggactctcatgtctagcttgtcccgttttatggctttggagtagtattagcaccttgtttttaaaagcaagggtacatacttaaacatattttaaatgcattttattcccagtgctggctcagcactgtacatgtaatagttgtctaaaagaaccattaagtggtattacttcctatttatggatgagacatttgccatcaagttgcaaatacaggaccattgctctttccgtaccacccatttagcctcagaaatctccctatgtctgtctttggaccagaaaccaaaattctcacctaattggacagtagagaataataagtaaagtgtttgtggctgttctttcytcctgttcgttcccccagataggcaaattctagagccactcagtatcatacttgagacccattgcccaagatgaatcctaatttataccagatgagctcaagccaagactaaatgtggaggccagtacatgaaaggaagcagactyccctctttttagkgcctgtgggccaataggtggaccacagcctgggctggaaacaagacagcaagcttccccttattgtgccactgcaatcattgagcaccatctttttctcctagagaggtaagggtttgggaaggaagagrcasaggtgaacaggctttgagattcttagcttccaagggtttttcagagccccacaaggtttgagtgggacacaacaaggaccaccccatacatatataccttgaccttgggtggttacttgagataaatgagccaaagactgcagagactttaaattgttctgaaatgtaaattttttcggctacactgctgaaattcacagagatttgcattttagaacttacctccaatmttggaataaaataatttttcatctttgttgaattttagacttcaggagcaagcagatgaggtagtttctttttgtctctctcctctctttttcttttttgtttgccttgcagttcctaagtgaatgtggtacttaggagcaatataaaaaggaggatgaatcaactataaaatataccttttaagttttacaactctttttattttgtttttgattagaatacacacttaggtagtcktggactttaagctcgtttgctggaagcaggtggaaagtgaaggaatgtgccgtgcccgagatccatgtttcccacaagtccataagtcctttgtggtttgtgtgcctgccctccttgtgtttttcactcagccagcttgtatttactgagmgctcgctcgccctgtgccaggcctctgccaagcctactggttctgccctggagaagttcacagttccagccatctgggaacatccagtgacagtgcagcccaagcaggaagatggttaaggcacagagragacagcawtgaccttcacctgggtggatccaggactgcctgcttgtaaaggaggaggaggcaggagtccatccagaagaaaaggagggaggagagaaggttcttttgggcattagcagtggcagaccaggtgtgagagagcaggagaggtttgggaatgagggataagttaagtgtaggcagagaccttagcagatgacagagggaatagttggagttaaagctggagagcttgcagaagcccagattgtgaagggccttgtgtgcagtgttgggaagctctttatataggggaacaaaactttgagttttggaacctagtgacaataaggaggatgggttgaaggaatgagagcctacagacaatgtcttagcccacagcctctaggaagcagggcctgagacaaagactaaagtaccaatattttgctgcagaaggagttgcaaatccagggcagcaaggatgaaggaaaagggaagtgcagggtaacagacggtgtgtctgaccatgctggctcctgcctcaccaggggccacagagacacagcagcacattgggctgcctggactctccccaaaggcctgcaaggaggagctctaccttggaatagtggaatagtctggaggagagaaaggaggtgggttttattcgccctgctccttcctgtgtcctgtttgccatcaaccttggttcacctcatagatttctaaggcccctataattctgcgatgctatttaggaaggaggaccccatcaccccatcccatggtaagcttattccccatctggcagcagagggcagcctggtttgtgtgagcactgactgaaaaagagaggagcaggggcaatctgaaagggctcctaaggagcgtgccactgttgagacaacgagcccagcccagacattacgatagcagttcatgcaggagggggctggcagagcaaatggaggcgacctgtagtggagggaggtttacaagatcttcattctgtgcagttgacagccccaaccccaacctttataggagttacgttacagtaacagtaaagtactcccatggctggttctggtcaatgcatactctgtggccttgtgtttcttaaataaaaaataggattcattattgtatgtttgtaaaaccatgtaacaggccgatttccatatttgtggggaaagaggaggagctgccacaggctgagtatcccttatccaaaattcttgggaccagaagtgtttttgattttggattttttcagatttggagatattagcaaatacttaactggttgaacatccatattcccgaaaatctgaagttgaaaattctccagtgctcagcattttggatgacgtgagctgtggaccgagaccctgccactgtcctgttaggccttctctgtaggacttaaatttttctctgccctccatggagtgggacacacgcttgcctctgcagcctggttttgtcaccctggagagggattgacagcacttcccagggaggactactgctgcctaagactcacagatgttcaccctggaggagccaactttgggctgagctgcagaattttttaatgacaggtcataaggtgctgcgtgaatgaggggaactgacgtccaggagaaatatgtgtgtctgcagtggggagcaggggtgttactggggaggatactgctattcaccaaagaacattcctataccctaattcaccagctaaaaaggaagttggagatcaaagagatatccgcatccccatgtttattgcagcactatttacaatagccaagatacggaattagcttgagtgtccatcagcggatgaatggataaagaaaatatgtacataatggaatacgattcagccatttaaaaaaaatggcagtctgtagtttgcarcaatatggatggagctggagatcattatgttaagtgaaataagcaagtcacagatgtcgaatgttctcactcctatgtaggagctaaaaaggtggccctcatggaggtagaaagtagaatgacagataccagaggctgggaaaaggggtaggtgggaataaagagtagtgagttaatgtgcaaacataaaggtggatagaaggaataagttctagtgttcaatagtagacaagggtgactatagttaccaacagtatattgtctatttcagattagctagaagaaaggacttgaaatgttcccaaaacaaagaaatgataaatgtttgaggtgatggataccctaaagaccctgatttgatcatcacatgtagtatccatgtattgaaatatcmcatatatcccataaacatgtacaattattatcaatttaaaaatgttgtaaagtaagttggggaaagcttctgattctctagttctgcattctaccactcccccctgctgtggacttacaggagtgttgcgtaaattgaattgtttttctaaagctttctctccaagctctaaatatcttatgactggttctgaacatgtacctgcctccagctacaaccataaacagctgaagagacactgacaacactgctcattgactccagcatgcgctctccttccctttgcatctcctcccctcaaatgagcttaggtggatttaagttttaatcagttagatcagttgttcttaatgagaatttaaattgaactagagaataaaagcattaggggggttgctggttgctcagctggaacctttgggcgacagaggtggttgcatgctgtgatatgatactcagtgcaggccctttttgactgcatctccagagatctgttggtgataaagtttttagagcagataattttctttgaccttagtctcttaagttggagaaggaaagctttctaagaagtgatctcgatccagttcttagatcagtgggacatacaggtctatggtggtcacctatggtcaccttcaccctgggcctggatgaccaaagtaagggaagggaagggggagtgtatgctggaaaatgtctcttacctctaacgccctccccattttgagccttcccatgtgtaggggaaaggcagacaaagacacctttaattttaaaaatcctgaatatcctgcatcttaaacacaaaagataagagtgtccatgaagacagaaggggatcctttgagccccttgatggcaagaactgacccttccatcctggagaagaggagaccaatttgatattatggaggcagaatatacaggactgtgtgactaattcgacatgtgtgtccatggagcttgaaggggacagaaccacaggtgcaaaactggtgtaggtacttggctgggagtttggtrtgagaggcttctggggcacctttacctggaataggcagcgtggttcatctgcaccaggattctactcagaactcttacaagtggtaacaagagacctgaggtagaagtacctaattgttacatcaatgtcaaaggctaaagttaggcttgaaacattttttttcctctaatcagctgttgggattttcacrtttatgaaattggtaaatcctttctgaaggtaatctctagttttgattttaccatgcctaaaagttagtaagttcatacactttattagtctttacatatacctctttatatttgcctgaacttgcccccttgttatacttcaagaaaccccagccttttctgggatttaatggyaatacatatgtaatctagtaccttgttactttcccaggcatttagtctgggaaccctaatcttgagtctgtctacagtggatatttttctccaggacaggaaccaaatgggccagttactggtctrccctgtagctcaccacagacatagcctaggggcctttggcccatcttcactagttggcaactggctttttaggcgaaatgcctccttttgcataaaggagagatgcctgtccccacctgcaccgcccrtctcctgctttaaggccagcaagatgtcccgagaggcctccttgtagatgagtgaaatccacacagggaaactcaagtaaaaatatggggtggggtctgggaagagctgtgtttattataaggatccagagggacctggggaatttaggatagggaaccactgtgggtgggataagaaccagagtggctccaggccctagttttttctcctctgtctctctgctttcttttcccactctcttctctccccttccttctccttattcttcttctactcctctttttttttctagctctgtgtcatgcttgcagtggtgatgttttggttgtagtcatgctcttgggtccctcttatgaccgactgtctgcgtcttcccctctcctttagcctttacttggttcttttcccaacccacccgccaaaactggcaaccagcttcctcagaacttgttatctggctcgtaattgcccagactccaacgctcaaatgacctttttgctctaaagccagtggccatctggcagtaatctccctgtatacaggattctgagttcccaagagagcatctggttggctccccttgccttcctgagtctgctacatcattcctgggctgctggccagcctaggagtgggtcccctcaggtcagacacaccctgggcaggtcagcagccagcagtgggcacagggtaacagagccccctgcctacttaacaggagctgtgggtgggggcaggagttaccagatacatctagcacaagaaccatatcctagaacccttcaaactaacatatgccaggtaggtgtaagcttctgtactaatttaaaactatacatttctaagttaatgaattcagcatcttgcggccataccagacatggcatggaattaaactttcagtcccactgttcattttattcatacattagggtggcaagggtggtcttgctcattgcaagcaaagtcatcctggttcatgaaatgaagaatgtggactgtgcagttttcccagtcatgaagacttttgatacatcacttgaaatgttcctcctgaagttgagggtcttttgtaatatcaccagggcagtgaatggcagagaccagatcatgaatcgcttcatttagagcctgcctccgggcttccctgcactctgtggctgctaataccacacccctgtgtcccttgtggtcttaagtcacaaaaccagctattattagatttgcctggagtgtctgaaaacaggcttagaatgaggaaaccttgtcccacttttatacaactggaaaacattacagaatttgactttttgaaaatttcccaaaaaaaggaaaagaaaaacccacaaaccccagcttgtacagtttagtcacagggaaacacagaggtaaaaaaggtgaacttgcttccacttcacaggtggttttgatttagaaaacgtgcctcaaaattcagtgcctacaaatacaagaaaaggggtttggttgtgcttctaatagtataagtaaaattactcttgaatgtttcagggctcatcaaaatttayatttattctcttttttctacttttatctacctgagtattctcattatctctccagctgtgagaaactctcatcttcccatgatcccaaattaggtgggatccagttctgacaacatgagttaatcatcactagaaacattggcaagagctggggaatgtttgtattcctctgggacagcttagcatctctgggtaaatgttgcagtccaactgactgccttccccgggctgtccttccccaaacttcctctcctagaggtaggaagagccaaaatcaactgttaggtctgtggtaatttacaaagcaaggatgatatttcaaaacagttggctatataatgtatttcctcttgcaaaattatacagttggtattcagtaatatgttgccatataatgtatttcttcttaaaaaattatacaatggctatatgactgtttatgtccacaaagtccagccagattacttttcaaagaaattttagcagtttgattgccaaattcctgtgatctccrtattaagaactctctgtctgtggcctctagtcttagaagttctagtccatgatacaggttgttatgcaaatgaaagaaaaagagaaatgtcttgtgcttgttttcttctttagaataagaagatctacttggacattattcacacatacatggaagtgcatgcaactgtttatggctccagcacaaagaatattcccagttacgtgaaaaaccatggtatcctcagtggacgggacctgcagttccttcttcgagaaaccaaggtaaaaattcaccacggatgtggtgttcaggttattgccattgsctrtgaaaatgggatcagaatatttcatgcttgtttttcaatgctgcaataaactcttgtggctattttggggcagcagtttgctagaccaatggcagctgaaaagtaagtgaattgtggaatgagattgctacagtttttttcattgatttattcaaaaatcgtatttactaaggacctactcagtgttaggtgtcaagcaaggggctaaggataaggctgcaaatggaaaaggtaaagccctgcctggaaggacagactttctaatagagcagcagctttcatagtaagccaggggtgctgaactcttcccccaacccaatcatcactgttcaaggagtgggtttcccaaccagcttttcctcatacctccttgttcaccaagtacgcattggacagtgaagaagttcagatgagggcaaagtccctgtgggctcaggaagcagagcaagcatcaggagagatgcaagagatgaaagatggatggagtgtagacacacctggcatgtgggccagacaggagttagagtcaggtggtggaggtggaggtggcatattcaggaaagagctagaagccaacccagctagtctaagtgttgaaaaatagtggaggtaaaattggatgagggaatgtgagggtctgattggcacagatggaggcagagttcacaccatgtggtggaggtagccgggcaagcccttgaggatcattttgctcagcagtagcatgatgacgtgttgctttgacactgtagggaagtccacccagtggtctgtgttttttctgtaatggtgccatggaagtaccaaatgaagttcgggaacttgtgaagaaaccagagtttggccttgaagggttggctggcatttcagtgtattagataaactccctcaggtttattaataagtttttatgaatttcacaaatatttattgagtagctgcaatgtgctaggcgttgtacaagggatgcaagtgtgaagaaggcacatggatctctcttgtggtatgtcctaagcacaaggaagcttattttcagtagtggatttctcagctctcatctctggctcgctttgttttcatgttcaaggtaggggagagaggttgagcaggtggacttctagggcataatctcagttgtccaatcattatgtgatacttcatttataaaaagtgtattcrcatatgctatcctctttgattctcacaacagcattaagaggtagatagagcaggtattattgttaactttattttgaacatgaggaaataggctacagagtttggcttgcccacagtaaactggggtcaagtcctggaggtggccctaactcatgatttttttaattgcacattaaagctctgctagccccttgatgtactatcgtcataaacactcaaacttaagaactcttagtggacacccactagccaaaagaatgtatatctcctctttgcctcagtttctccatctgtaaatgcatttgatcctatctacgtccaaggcatttgtatgatgccacaaataaaatgatttgacaatttctttagcttattggccaaagacctggtttgttttaagattttatttccttccaaggtcatctgtagtctgatgactgttttttgttatccaggagtgaagtgtgttctctagttttcactatttgctttctatcaccttctgtcttaggctgacatttcagaatcatcagaatgtctgggccctttaatggcagtgctgtttttgccatttgcctcattttacttttctccacatcagattgtggaaagagctcaagctcctttaaaaaacacttggcagagctggttttcagcagtgtgtcattactgtctcacacacttttattaacccaacctcatgaatgtctctctcagcttcgcaaattttgaaagaacccttacttacctaccatccattaccctgtcagagattaggaaataggccaaaacggagatcgctgatgtccaggggaggacargaaaagaggcagggaaggcccaggccaagatgtccaagtttgtctaatgagcaaggattgcagcctgagttaaagagcacgaggggtgtatgttcatccttgaaaaactgggacccgtgtagaggatgtcactgatcccattacctattgcctgctccttgagtagagtatattaaaatactctgagtggaatcatggctcagacatttggcaaatgtgacaaggatggggcagcgtattgctgagactcccctcacacytggcacacagctacaggctccaaaatgaatgaacctttggctttgaaataatgacatgaaagaccagtcaggcttcgcatctataaccctttctgtctctgactcctttctctctgtctatgagcaatttaaaagcgatttattctaatccacattggaaatggggaactggagcagccgagaagcagatgtctgcagcatgaatgggattcacacacttcttggactccttactggcaagagaagcagggctgacctcctcaagagagttagagacatagagagatgattgatgcttgatcagcttctgactcattatttttctttacaagccrtctttgaatctctgcaccaatcttaggaaaccctctgctcagcagaattttgtccaggcatgccattaggggtgcaggcgtcattagtagcctcttgcttcagggaacctgtgaagatggaaggaattcaatgtaacactaatactggggctaaaagagccaggaagttgttggaatctagcagatccttctaattggggtataaacttggatgaatgaattatttatcacaggaccacagccgagtcattcagtccagcaaaccccaggagtgcagtttaagccagcaaatcaggactcactagggtggcatgtttttatttttggtttaaatctccatctcttttaaagwggcttctttcttcatcttcctggatttaacctcttcatgtccacctccctcagtctyccctgtttcatatatgatactgaatagtgcatttgcatctgcaactcactgagtgctttgtgagctggaccagtaccgtcctttctacagttgaaaacaaattctggttgtggggaagaaaacaggcaaagctgtggcttctgcacatactgtcgctgtaccccttctgtacccagacctccactcattcacctctccaagacttggctgggtcatgacggcactgtttccccatcatgtcagcttatcagcttacctgtgggactcacctaggaacatgggcaggcctggcaaatatgcagtgctccctctgactcatcttatcctcatgactgactgtgccaccctgccccccaccaactatgtctcttcttactgagcttggatgtgctcacaaaacctgtctaaggcaggtgcggtgcagtagctcacatctgtaatcttagcactttgggagaggctgagtcgggcaaattgcttgagccgaggagttcaagaccagcctgggcaacatggcaaaaccccatttctacaaaaaataccaaaaaaaaaaaaaaatagctgtgcgtggtggcatttacctgcagttctagattttcaggaagctgaaatgggagggtcacttgagtccagaaggctgaggttgtggtgagctgaggacacctgcactccagcctgagtgacagagggagaccctgtctttaaaaaaggctgtctgaaatacccagggcttgaggcagcagactctcctgcagctgcatgagggcagagggcctttgcttgttctatccacaggtgcatccacagtgcctggcttctaaaaggcatttagatgattgtataaagaatgaaagaaggagtcaaaatgaaacacattgaccatctgggatctctgagatttcttcctgttctcgtataccctgcgcctagatctcttagatctcaccagctagggacactacccttctgataccccgttcctgcctgtctgtaatgttgcctacatctccaggccctgtgagtgatagcccaagagcttgcttccttaggaggagcagtccttcttctgtttctattacagatactggttcccatttgccctcaggcagccaattgaagcaggtttcatcctagtgagcatacttcaagtcattcccatgccatctagatggggaaaaaattgtacgaacacatccatgcctccttccctcccccttatctacacatgtatatagactgaagagtgtacagaggtatgagtcagtaacctgtctgactttcagagcaaaagtgcatccctacactcaaataaatacaayacgttcaacttctgtgcacagagacacttgattgctggaaagatccagtctcatagtatttattcttttactgtttcatccagcaagtaagtataatattaagtactagatatattctaggccttagtctagccattctagagacagtgatgactcaagcagttttgcccacaaggagcatacaggtatgctggaggaggaaagcaggtaactgtaacaatgtggaaagtacacaggtagaactagtcataatatgaaataatgatacaagcataaaacttcactgtcacgctgagtggggccaacagttcagttgtgtaaaatgtggttctgtgacttgtgaaatcaatgtagtgaattgggcagtcccattcagaggacaggagccactgtcagtcacagtttaacacctccatgctattgcgatgcacctgtctatgggatttaccataacagtaacagccattatctctcccctctaccatgtactaggccctatgctaagccctttctgtgtattctctctytgcatcacaaaaatccaatgatcttggtactgttataaacggtaccattttaatgaagcagccactgaggctccagtcgtaaataagcctgttttgctgcctccgtgttggcggctgaggggttgtcctggtgtggaatttgggggagagaggcgtggtcagaaaagggtcctcccaggagatgatgcctgagtggacttttaatggkgagcacttgaggctggcccaactgaacatgttcagcatctacaggtttaaatttatgcaaatattcttttactcccctatctccaagttaataaatttacaatgtgaattgtaatgcatttgattttatattggggctttcaaatgaccgaaactcaggaactttttatcctgatgctgttgtttgtggtttgggtttttgtttctgaaacggtagttaggtagcttggcataatcagccagctggtcttcaggaaatagtctttggtttagcagcagactctgacaaaagtctgctttgggcatgtaaacatgcttggtgagtcttcttttcttggcctccgtggaccttccagctcttccctagagagtcttcaggtcacatgagtcaggggcttgtggagcccttgggaggatagagccagcctggatggaagagagtctggccactgtttatcccttccttaagcatcaggtacctgaaagaaggcagatggccagggagggaccctttgggctacatgaaagcatcacattttggaaaaattgttttcttcatacccagccccttgtctgggttatttttaagatataaaagggatgcctattaccagaaacattaatataatgattcccagtcattgtataaaaataaacaagcaaagcttagcaatagcatgtgactcatgggactggcttatgtggcagtcactgtaaaccatatcatctcttatctctctcttctgatgaatatccctccccgttttttagtgcagatactttatgaaacaatgagaactcataaatatacatgcaggtgctgaacatcttgtaaaaacccacaaacataactcctgcacacgtaaactccgtctaaatgatataaggccatgatatgcagctgtgtgaagttgcatatggatttgaacttgagtgactgattatccagcacttactaagtgccaagacttggaatgawtcctttccatgtactatctcatgtaatcctcacagcaaccccatgaaataaagcactattgttttacccattttacacatgaaaactctgaggtttagcaagcttgttacccggactaaggtcctataaatagaatagattataaatgggccttaactaatccatagacagaagcacctagcagtgtgtcacagtgactgacctgggaaatgatggagctagaccttgaagcctaatctgtctccagaacctgcgctgttaattaccacattgttctgggcactttgtgccaataatggattcatcaattcatttgatgaaccgggggtgattcattgctcagtttccctctagagtcaccatgccaacttcgctaattaaaactggccagaaaagtatgtgttgtgtgtgtgtttcctatttatgattatcctcaatgttccccatcaagagtgaaactgaccaagcccatggataagaaccccctttatccatgtttaaagattctttaagtactccacttagcartttaaaacaattgtttcttctttcacagagtgggaaaaatctgggtggttttactggaccctttgtgaatgtgtaggaacgtcccaatcctatactgtgaagaaaacgtatggtgcctcatctgttctctctgcttagcattagttcagaaatttaatcctagatcccacaatccctctgtgtagaaatactcattgatggagctggagttgcagccatggagatattttgtcatctggaatatcctcattagattctgggcttctgaaggcaaggtgaartataagtaaaatatggccagttttctccagcagagttaagccttggcacttaygtacattcttgcagtgtctcttgcctccttgctaaggaaatcggttaagtaggcagaatagcaggagattaggggaaaagcaattcartgtggttaaggtgccaatgtgtggcaagaccataagtgcaaggaagtttacagagtgctgtttggtggtgatgaactctctccgcctgttgtgttttcattcaaacctcagatgtgctatttgaccttaatacatctgctccattgtaatatcacaggtaataagcacacaggaagcaagaaaaaaattgcttattgactgaagtgacaaaaaactgttattttggtgtttccaagtaatgtatttcctacaatcctaattgtgtgacagaaaaactcattgccaggaaattatgttgtatttgcttaggcttcattctaaacatatgaggctttgggagagttaataaagtttttattttatgtgtactgagatattctggtgcccacagggcagaagagatggttcatattgttgttcagatataattaaacctaggtcacattcaagtccattaagcaacagcctcaaatccttttaattaatggattcagattgatctaaagaagctaattaaatttttcccaagattttctatttaaatagacaaacattgtgctgcttgcatttcctccaaagctgttctttgaaatttagagttgatgaaggtatccacacttcatggcaggccctgattttcagaggtcaggaggcactgtgggttctctgactaaacctgcagaaatcctgatctgcgtcttctggcacttttctcctcagtcagaaagatctggactccctgtgctatcttatgcccaaccacsgcytgacagaggtcatttgttttccactggagagccggcrcatcctctccaaagtctgataggagagggcaaatcagagatcacaagtctggtagataacaaccctggattcttcatattccataaagctgggatgtcgtgggactagtacattcccactgtttccttccrtttcatctgcagcagtcagatctcccccacccctgagccacatgtccaggccacaccctatagttagaagttctctctgacaatctcgtttctgttagctgtataataagagtaagatgcagagcaggagcttcctaatggtagtagagctttccctttatcctacagcttccaggctcctggctaccatgttttcctcaccaccatcacccccacccgtgatctctggtggttctgctgcccaagggggaaatgacccagccagcattaggggctctgctggcctctaaagcttcttttcttcccagctccctgccctgtggacatctctggcattgtgatcacgcagttttcaggaaacgaaaatttattctttcaaaaaaccaaaaagattgagtaccctattctgttcaaaacaaaagtaaataggtccagaaaacctgagatgttagtgctgtgccccagaattccttcaggagctacctggttctccagtatgtcacccatgggctgtgctcagggttggcctgacacatgcagcccggcagcttgggcctggcaccctccagctgaacctttctaaacgatcattcaattagagcagctgctaagagaggaaagctggtgagaaggaggggattgctgtgaaaagaccgagggaaaaacagaaccaagcttgcagctaaatctagttgagccatctccttcattctcaacacctggccttgtggttgggtgatgctctgtgatggcagaaggtaaggacgccctggggcccagttatcttttctcacttaatgtgcccctgggggctgaaacagaacaggcttttatgtgggtagagaggacacagcttcgtcaagcccagacctggaccctgcccatcaacaacctgcagtgctccagcagtgtgaagtacacccactgtgatggtacgtgccgaggcatttctgtgagcagttatttcatttttggacccaggaaatcagcaccactgaactgcagcttgtcccctttgtcatcgtggcttccagctgctgtggttgctctgaggactgagagcaagttgttgctgccatctatggtctgtcttgggggaagcacatggtttgcctgctggagagggaagcagctgccttgcagattcagcaacacagcaccctctctcccctctgaggggaaaatcaacaccaagatgttggtgtccccagtgtaaaccccattatgaaaacctgtgtttactgacctaccatcattttaaagcagttccgtttgaactgcaatcaaacctccaagtgacctttctgtccctccgcccagcattcctgaaagggcctgttgtttctttggttcaatgaagaaaccttctgtgtagttaagcaagtgtttttccagtcatgtctcctggtgagttacagaaggattattgttgggtcttggtggtggtggtggttgtttttcttttaatactccatcctccctaccccgtggatacccctagacacttaattttttagttccttggtggaggagagcatagtgagttgagcagctttgtggggactttaaaagttcgtagtttttcagatcctggtgtaagctgaattctctctgccccaccccccagggcctgggagccttccaaagtgaggtgtccacacgggaatgggccacagaatcgccgcctgcaagctaggaatgcccgtcctgcctgatggtcctgcctgatgtgttcatacgctgtgtggttttctgtcttacagttgtttgttggacttgggttcccttacgagggcccagctcccctggaagctatcgcaaatggatgtgcttttctgaatcccaagttcaacccacccaaaagcagcaaaaacacagactttttcattggcaagccaactctgagagaggtaagcatctatcaaaattattccattttgaataatatgaataatagctatttattgagtgctcatgtaggtattaacttcatctaacatgattgggtgggagggtgagggtrtagaggctcagagaggcaaatgacctgatcacatcaccttgcaagttaggggcaggatttgaatctacttctgccttcaccaagtaagggatcttgacactctacccccactctagcttactgtaaactcagacaatctagcctctgattatagctgaactctggtttcctgaatgtttgaagtttagggagtgagatcaactggttagcagatacttgtgaagaatctgctccccatgatgggctttggagaataaaaagtgggctgtgggagttttcaaagagccatcagcctcaggataccatatgtatcatggataactgaagtaatgtgactgatttttttcacccaccatcccaagaagtaatcctaccattgctagaaccatttgcagaagcctcatttgaattgccttcagagatcctgttgaaaatctgcagtgtgtgatgaatcaccattgagggtagttggatttgatttagggcaataaacaaaagtcttttacagctacgtgtgagtgatcaagctgggtgtttcttcatctggtcagaaataggtgtgtgcaagaaaccataagattgattttctgattatttctatgtagttagtagtaagtgactctgcaggcagcttatgaagggaagtcatagcagcatccttgtcattcagggcctttggctgggggattacattgattagcatccgtcccatggcatatcaatgtagaaggacagtttataaaacatatatttttcagttctacttttaaaccccttctgagtcattttctctcccaaatagtatataagatgcattttcaatggttattttttattgatcagtcagaaaccttgacaatttatagaactgattactttgagagttrtttttctctgacccttcctgtcattggtgaaatagccaaaggagatagaagttcaataagatctatgtttatctataaaaggttaatccgtggcccagataacctttgacaagggttgtgcacacacttgtgtgtgtgtgtgtgtttkttttttttttccttctgctagaataataaatttgaattcttcatttggggagtggttttgtattaagaggtcagtttgttcatttataagtcggcaatacttaatgtacatctgtgtgctaggtgctgtaggaagtgctaggacacagagactggggacattcagtctgccgtgaacctattcttttgaaaagtttaaaaagatgctgcccagcagtgaaaatatctcagtttaggaatctctgctttagcatgtgactgacttctttgaaactttggagtttggcggggggaaagaaactagtaaatcatccctcgggttttttgtttatttttgacaaaaaatatgcttaaggtgtacaccttgatgttttgataaatatacacattgtgagatagtcattacaatcaagctaatccatcaccttacatattaaatagatatttttttcatggtaaaaacacttaagatctccttttttggcaaatttcaagtatgcaatacagtattgttaactatggtcataatgctgcacactagttctccagaacttaatcaacttgtataactgagactttgaccaacatctccccatatccccacgcaccagtctctgggaatcacgaatgtattctctgctctgcgagttcaaccattttactgtgagttgaactgtgagttcagctaggctggtctgcatgtgggatcatgcagaattttccttctgtgcctggcttattttacttagcataatattttccacattcatccatgttgccgccagtgatgggatttccttcttttgcaggctaaatatttcatatacacataatttgtttatctattcatccactgaaggccacttagtttgtttccatatcttggctattatgaataatgctgcagtgtacatgcgagtgcagatactgctttaacatactgattttaactgctttggatatatacccagcagtgggattgctggattatgtggagttctatttcttattttttgagaaacctccattttctttttcatttatggctgtaacacattacattttcaccagcagggtaccaagcttccctttttaccacattcttgccagacacttgttatcttttgtctttttgataaaagccattttaacaagcatgaggtgatatctccttgtggtttcratgtgcatctccctgatgatgaaagatgttgagcaccttttcatatgtttgtttgccttgtgtatgtcttctttcgagaaatgtcttcaggttatttgcgtatattttaatttgattggttgggttttttccgcagttgagttgtaggagttccttatatactttgggaattaaccgcttattaaatatgtggtttgcaaatattttctcccattccataggttgccttttcactctattgattgtttcctttgctgtgcagaagctctttagtttgatgcaatctcagttgcctgtttttgcttttgttgcctgtgcttttagtatcatacccaaacatcattgcccagactagtgtcaagaagcttttgcactttttttttcctcgtagttgtgctgtttcaggtcttatattgaagtctaatcaattttgaattcatttttatagatagtgtgagataaagatttgatttcattcttatgcttgtggaaatcaagttttccaaatattatttattgatgacactgtgcttctccattgtgtattcttgtcagcgtcgttgggaatcagttcttttctggtttctctgttctgttccattggtctgtatgtctgtttttatgccaaaatcacctgtacatttgaaattagstctaggaaatctctaaagttctacttctgcccaaattgtagatattatttttccatgttttatgcccaaattgtagatattaattttccatgtttgtttaacatttgagataaagtatatacaacataaaacttaccatttatcgttaaagtttttaaccatttttaagtgtacaattcactggcattaagtatatttgcaatattgtgcaaccatcactgctatccatttccagaacttgttcatcattctaaacagaaattctgcacacgttaaacactaactccccattctccccacttctcaacccctggtaaacctctcttctactttgtgtctctgtgaatttgcctattctaggtacctcatataagtggaaccatataatgtctgtccttttgtgtctggctcaccaacttagcatgttttcaaggtttgttcatgttgtagcctgtttcagaatctcattccttactttttttttttggagaccgggtcttgctctgccacccaggctggaggagtgcaatggtgtgatcatggctcactgcagtctcaaactcctgggctctagtgatatttcttcctcagcctcctgagtagctgggactacagttgtgtgccacgacacctcgctactctttttatatttggtagagatgggatctcactgtattaactaggctgatcttgaactcctggactaaagcgacccttccaagtagcttaggattacagacacaccccaccacacccagctaattaatttttttttttttttttttgcagaaacaaaggtcttactatgttgcttaggctggtctccaactcctgggatcaagtgatccccccmacctcagcctcccaaagtgctgggattacagcatgagtcaccatgcctggcctatgtcactcctttttatgaaaaaaatatatatatttcactcctttttatgaatatctacacactactttcttaaggctgaatattccattgaatatatatataaatcattttgtttattcagttattgatggataaatgggcaaaaggttgtagtcaccttttgcccattgtaatgctactatgaacattggtatacaagtattttgagtctctgctttcaatactttgaggaatgtacctacaagtagacttgctagaatttactttttactttgaaataattttactggtacagaaaagttgcaaaaataatatggagttcaggcatacccttcatctagcttcttcttatggcagcttctacaaaactacagtacagtggtcaaaaccaagaaattaacattggtaccatagtattatctaaactacagactttatttggacttcaccagtttttccaccgagatcctttttctgttcctggatccaattctggacccacattgcatttaatagtcgtgtctccttagtctcgtctgatctgtgccaattcagtctttcactatcacccatgaccttaaccacttttaaggagcacaggttagctttttgtacactgtttctcaatttggatttgactgatattttcccatcagtcaaatttgaagttatgcatttttggcaagaatatcccagaagtgatgtacctttctcagcacatcacattagggggcatatgatgtcaatatgttgtactgattgaccccaggtttctccactatgaagttactcttttagtcttttctctgtggtaggggtagtactctggggctatgttagaatwtcctgtttatcctcaaatttttgtatcatatagcagtggatttgtatagtrtcacatactatacaaataaatacagtatttattgtatcatataggactggatcatgtctgcaacartgattactgtggtattctgatggtgattttctgattccctcatgattttttaaatgcatgaaaagcaaagaagcccctatcttttcttactgcagtttctatatacaagcctttgggaaatgaatcaaaagtagctgagattaagttggcaactgacacacttttgttaaaactgactctaaaggttwtaatgacactgtggccactgagtatttttttcccgggaaaaaaaaaattaggacactcttaaacacaatctgaacattgcccagtgaatgatgtaatgttacatggatcagatcagccagcgtgaagttatcaagaaaagcatttcattgttttctatcagttgccatcattttgtaatttactttttgctgaggtcatggaaggttttcattcttcatgctgtaagaagagaataggcattggagctgtcacacggacatttggttcctcctgtcccttcaacccttcagatgattccaccagcccttaaatgtgactctattagagaaactgtgggatcctttcaacagtcgctcagcaagtgacctcacacagatgactccatcagtcctaggctcccccaggagggcaggatgcagaggggagttgacaggtgtttaatgcatccccgcagggtggtactagttgctgcactgggagaattcatcaatgtacatttcctgttttccaggagctccaaatctgatatgaaagagttataggacaaatgcataatcagtggaagtgcatgaagaaatagctaagtgaattcaggaggggagtgaacttggagttgtgctgggtggaggatgtgcagggttagctgcgaaggggatagtggaggagctgtgctttcaaggaaaaggaggcgagcgggtctcaagcctgagaagcatgaatactgacaagtcggggataccycaagaaggtcagtttgctttatgcaagagggcaggttccatctgatatctagctccctccagcaacatcagacagcattgagagggaccagcgagcttgatctcatgtccaggtgggttaccctgtcctgctctgccagctcacaaaagtccacaaaatccctgtaaccaaagaagcttttaatgggaaaagagctgtcaacaggttcatttctaagaatcaaaaatccctagaaattatcttttttccttagcaaatggaaacattgtaaccagagtatacataattacaaaactatctttttacacccacacaaatctttcatattaagtaataattgatccacctaaattgatcatatcaactgcatacatgtctctttgccttcagttgaagagaagaaaaggtctggatatctaaatgtgggtttagctttgtttttatttttgtgctggaccatttttcaaaccatgatgtctactcagagggagaaaagttccgcaaggccttaagtaatgtggctggttcaggttatgttttaatataaactggatttttatctttatattgggaaacatatgagtaggttctcgatcatttttctgacattttttaagccattagaaatactctggcttcagggtttgtgtgtgtgtgtgtgtgtgtgtgtgtgtgtgtgtgtgtgtgtgtgtttccataaagagaactcatgttctccttggagatttaatagccactctgaagtaatgtctcatatttaataagattttcattacttttacaaactatactccagtaaatttattgattgatatacaatgaagtatcttagatcagatggttctcaataaattagcaagaaggaacgtaacattcagaggggaactaatgaatcacaaaatgcctcactcataaagctaagtaaccttcagtaaatgtaaatgaacaaaaggataatagctcagcattttgtattttccaagtgcttggagcaaccttgtaaataagcagagaccttaaaaggcaggagaggagggagactgctgacatgtaaattactaaatagtgacattgatggcaactttaacttaccctgattccgtcagaaaatctaatcagttctccaggccacaaaatgaaaatgatgtgacattttgctcatcttcagaaaatacaggcataaattcagtcctgaatttaggttggcaagttgtaagagctggattaaaaagctggtgtttacattgggcctttgtcttaagaacttaaagacatcctttaaaattgtcaccttcctttttatccaaagctaagaagttgttgaaggacctagatttgaagttggctcttctcctttccagctgtggggtcttaggggaaatgtaatcgcctctcagtctcagaatcgtcattgatgcataataaacctgagaaataacgtttgtgcaggtgattagcaggaagcgtagggcttccttggtaagtgttgaattcagaagtgtgcagagaaaaaaaaatggaagttttctgagttccgtgggcctgcagagagtctgtagcttttatcactgaccatagagctgagccgaggaagacagcacctgtcagaagggcgggaaactgaagagactgatgacgggctgctgctggatagaggcccagataacctgcagtcagcagaggctcactgctgggcccagggacttgtcgggcttcctgccttgaatagcacatgcatgctcttggtgtggcaggatacaaagaacagtggctaagggaaagacggaggggtgccagttaattcctctagccctgtgagtatcctgaggaaaagaggagagccagcttgacctccaaagcaaaggcctgaggagaagagaagagccagcttgacctccaaagcaaaggcctcagcactgscaaacccaatatttcctattgttataaatatgagatgaaatttgtaaattatataaccttgcctacccgtgtaatttcaaaagggaataattctctaacaaatataaaggagaaataaaaggaaaagaatttctaataaagcaatacatatttcagtattatggaatcaagaactgtgctgtcccatacccaacagctataccaggcactatgatgccttgtttctcctcacaatgagtgtttttatttaaaaggaatgaaacattcagctgaatatggtcagcctttttacttaaaattgacattatgaaggaggagcgaagcctgagtgtgtttacgtatgcccacatataaatagaattgccagtaatgtgatagctccaaatatagactaatgtgggtatgttttactggagactctgwcatcctcagtggcactgactttgttgytttgatctttctgaaatgrtgacagctcattggtgacgtttcagataaaacagagcagagacattgcttcatttacatggtgattatgtctctggataattcaatgtatgtttgaactgtcaaaaagttagattctgactgggcatggtggttcatgcctgtaatcctagcactttgggggctgagacaggtggatcacttgaggccaggagttcgagaccaacctggccaacatgatgaaaccccatctctactaaaaatacaaaaacttagccaggcatggtggtgcgcacctatagttccagctactcaggaggctgaagcaggagaattgcttgaacccaggaggcagaggttgcagtgagctggatcatactactgcattccagctggggtgacaaagcaaaactctgtttcaaaaaaaaaaaataaaaaactagattctctaagcccacgtgaaagccctgcaggccatttgaaagtttcgtgggcagtggacaattcttcctgtgcaggactgtccttggacattgtgaagtgcttatatccctggttcccacccacagactaagggtaacattctccagttattatggtagctgaaaatgctctcacacgtggctagaatgctccctttacaacatgaccttaaagggatatgaggacagaggtggaaacaaaatcaggggataaatttagctgtattaaagaatggactcaactgagcacagtggcttgtgcctgtaatcccggcagtttgggaggcggacacaggagaatcatttgaggccaggagtttgagacccacctgggcaacatacagagaccgtgtgtatacaaaaaaaaaaaaaaattgtttttaattagccaggcatgatgtgcacatctgtagtcccaactactcagaatgctgaggcaaggtgatctcttgagcccaggagtttgaggctgcagtgaactaygactgggcaacagagcaagaccctttggggaaaaaaaagaagaatggacacttcatgaattcagaattgtcatggtttgcacttggtttctttgaccacatgttgtttttaaaataaaaccccctttaggacaaaaactgccattccttgtttttctgaatattatgctaattattattcctgaaaccatcccaaaaattctgtgtatttctgatggtgtcatttttttctatcaccttttgtatgcaccatgacttagcctcctgggactttaaaagccttgatttttcttgtaattgtctatgctgacctttctgtcttagccaggagaatagatactggtttgatctagtaataggtgattttcggggctgggttctgggtaggagaaactgttcatcatttcttgatgtgatgttgggggctaaagcctcctgtagcagcttccttgtcacctggttgtgacattatcttatttccaagtgggattcaaggtacagaaccatcactgttttgttatctgcttatggatggttttgatcatcaaggggaaggacacagtgtcttgttacctacacgattataactcagtaccataaaaagcatagcactccatctagcacaggttattttaaaaattgcttgtgagactgaggtgttcggttcttttccagctgacatcccagcatccttacgctgaagttttcatcgggcggccacatgtgtggactgttgacctcaacaatcaggaggaagtagaggatgcagtgaaagcaattttaaatcagaaggttggttcattttattccactttccctcctytctartgtgacctgaaatgtgtataaaayacatcataggtccttgtttttagcaaacagatctttaccacatcagcttaactctggaattagaaaataaccaagctgcaggatttggcctgtggatttcatgaatgttctgtgaaatggaaacagagctggtatcccgatgtgggcatggattccatagaccgtttagacatgaccatggatcccaggcacaggagcaggaactggagtcatacttggttcagtgacctgattatgttgctctcacaragatctgaaaagatagccctgcttcctctacaaaagagggagaagtgcaaggaaatgctgaggaatgtttttatagaacatctgtttgtttgtttgttctatctaaacatgtagtagaattttrtaaaagtaactacatttctggcctcttctgatcaattcaacagacatttgtgaggtacctaccatacacagagtgctstctgagtcacctggggttgtggagggcggggtgtttacttccataatcatagaggaggctggcttcccacctatcagaagtttaccatccagtaaagacgagttcagttatcctttctcccaactcggagcccaccgtggactctcacagctgcactctgctgctgtactttggtgggagcactttttacacttagttgcgatgctttaagagaagccggggtaggcatgtgggagggcaggctggacgcacacagtgtgggttcagttctagctctaccacttactagcagcttcccctcatgtataatgtagggctaatattaccacttgattggtcacttgtgaggagtaaatgagataatgtatgtaaagtgcttaagttcaatgtctacttgtgtttagtgtttagtcaatattatgatttttgttgatagtctaaatttctactacaccattagcaacatgaagtcaggatatacatctgtctcatttctgtatttccggtgcccacgtagggatttacccaatggatagatgggagagaggaatagatgtctgcaagtaagcataatacaaggctgaatatgttcagtgccaaagcaacatgcaaacgctccaggagcggaagctggggaagcctttctggagaatgcagccttttagttaagtcttacaggatgaggagtaatttgcaaagtaaaactcagaagtgggtgcagaaaggcatgggttcaaagcacagtgtgactgaaagggaagaggctggaaaggcatatatcctgggagggatagccagtgtgcccatgtggaggccatcttaccctctgggaaacagaacaggataatcagtttgtggcccactgaactgctgatttcagttaattcagaacatctccaggggagtgagggcactccgatgcattatctgtgctctacccgcttcaaggtggtctggttatggggctttagtgtcagcttcccattgatgatacatacaatcccaatcccagtttcagcagtttcagcagtccccaacctcaggagaccgagctgataaaagaagtgccaaatggaatgtggttcctctaggctgcctcaaaatatctgccacacaccaaaagcttcactactggagtcattcctatggaagggtgaaggttcttctttcttgattctcccagtcccttagtatatgagcttcctagggctgccgtaacacagtagtgcaaacaactgagtggcttaaaacagcagaaatttattctctctgttctggaagcaagaagtctgaagtcaaaatgtcagcagggtcatggcccacccycgaagtctctagctagatatcctcccttgcctctttcagcttctggtaggcctaggcatttcttggcttgcagcctcaaaggtttgatctctgcctccattatcctatggcttctctctgtatgtatctctgtcttttcgttttatacaagattagggcccaccctaattcagtgtgacctcatctaacttgtttacatctacaaagaccctatttccaaataagatcacattcacgggtgctgggrgttaggacagcatatcttgtaaaggggtacaattcaatccacaacacttagttaatgcttgtactcttgaggagagtaatttaaaagctgaggtagaagcagaaaagaaaaacacaccaagatacattataatcaaactgctgaaaagcaaagataaggaagaaaaccttgaaagcagccagagaaaaatgtattacatttagagtaataatggtattaacacagccaacttctcatcagaaataatggagaccgtaaaagggtcctcaggagccagaatatgtgtggggcctttcaataggccatggtaaacgttcaggggttttttttctcgtttgtgtttttagttttttttgtttttgtttttgtttttgttttgttttgtttttttgtggttggtttttgtgtgtgtgtggttggtttttttgtttctttctttctttttaagtgttgaggattttataagtatgatgggaagttttgaacaggggsatgagatgacctagtttactttgaaattatgaagagaaattacagattctgcttactcagaatcctatggttagtawatggaggagccgtgactcaaaccctggcctcctgatactttctaagaccatttcttattgaatgatgccaagccacatctgtcaggtcagaccatggagggcttctcatggaggcygatctctaaaagcaattgcctgtagaagttgtccctgayttggaaaggtgagttggtactagtggagacaggaaatctcacaaggagggaggccaagaagagaaaatggaggggaagataagggaaaatttccaaggtcagcaggaacttcacagtgcaatctgtaggcatccttcctgtggccctcgccatatgagtaacagtcctttttttttttttttaaacaaagcaggatgcccaagaatacttccttgcttctccacagctggcctagcttgggtttctcaatgactggatgtgatttagcattcttcttcattctgtcccccaaagaggccttcacttgttcctaaagaacttttatgcagaaaactgcccgctctcccagcccccagtccacattaacagctgtcacttcagaggctgycaggactctgaagagctttccaatgcagaagcccctgcctgccctcacccacagggtccagcaatatagacctaccttctgactcaccgacttccttccttccttccttccttcattccttccgtccctccatctctccctcctttttgcttttcttttataggaaaattgtttgcttcatatcctttaaaacagtgaactgccccaaagcagtgaatgagtcaacatccctttggttaaagtgggctaggttggtaggagaacagaggaggagccatttttctgtatttttggctttgaaccctttgaattaactttctttcattttctaatggattccctttggaaatgttgttggaatggtgcttgggtactcggcgtgcttcctaacataactaaatctgttcatctcatgaaagatgaccatggatgtttatttcactgtacaaatcctactttaacactgataaatgaacccagatatgccatgttctttgttttagatcattccttctatgaatctttgagaggaaacttatctctaggccagcaatagaaagcttctggagtcacccatgggttgagtaaacatcctttaaaagaaaagaaaaaattttacattttgtgtgaagggctgtgtctgggttagagagggaacagtaagttcaaaagcttgagttgacaaggaacaaactgagaacatgaaagtcagttcttcgtagtattttgagctcttcagagatgagctgtctaggaatagagtgacctctctgttcttgtagaatagtctgccatgatattacagtatttacggctcagcctctttgagctctattctgacagctgtaggccactgtggcccacatttgtgcatttgttcagcatttgaagacaattaaaatttctgaaaatcatggttgaagatttcaatgtaatgtgtgatttggcatacgagaaagggggagatgatgccctgagaccaactgcttggctgccaactaaggaatgttatttctgttcattgtcccattttcagcaagcttcaattatagaagttttgcctagttctccaccctgtagatcccagcaaacattttagaggtagctggtgctggtgaaggtgcccctccgtctaccctattgctgagaggagctgttgggctccctgaagcaataatagactatattgctggtgattttctctcaaatgaaatttccattttagattggtaatacmcctgaaaacacaggcctcatagtgttggcagacactgtgcagcagagatcaaacccacatttcttccccttctccaaggtgtcacaatattgataagattgcctcctctaccctaatgaagcatcctgtagagtttcctactcccctcaaataaaatcgggctctttagcatagaaacctcaaggcttttttggaaattcagtgaattttccacctcgtctcaccagttcccataatactgagctgcagttacctgctgtcctttcatgttaaagaccacactacttgttcaccaaggatgtcttcagcatcttggccctctccagtttgggcctgctagactcagcctgccttaaaagcccagcatgagtagaagtctgctttgaccctctagcctcccaggaccccctagctgacttcttgtgacactttataactttatttttacaccgtgagttcttcggatataggctaacctcacctacaaatacagaccaaatacaggtcactgtcacggatccttcagttgctcattgttgccttacagcagtgaccatgcattcattcaacagatgtttgctaatttcctatatgtgccacactgtgctcatcactagaatgtaaagatgacccaacagcatggactctgccctgtggaaattacctgctagcaagtgataacttccatcttttgttgaatgcccactatgtgctagtcactaaactaagcaccttttttctcccagataatctttgcagcttaaaagaggtgagtttttcttatcacccttttacatatgaggaacctgagacttagagatggcaagtcatttgctcagagtcccacacctagtaaggatcagcttgagatcacgacttgcaagtccatagtcaaccctcatgaggccgactcctggtgttagcacccgtgtattgagtgagtcggaggactgaggaggtgctacatgttctctgtccttctccttcatggtatcatgctctgtttccacagattgagccatacatgccatatgaatttacgtgcgaggggatgctacagagaatcaatgctttcattgaaaaacaggtaaggcttatcagaagtcagtctgtctttgctgtgtactgcttcckgtgacgccatagggctctcaagaacatttaagagctcactgtgtttctgtggctattttcctgctttgggagactctagaagctggataatagtagcactgtcatggtcacccaagagaaccagtattcccttggagtaggtatgttcttgatgacagtgtaaggtgaaatggaaacttataacaagagagatgggatgattactgtgaagatgcccctgaccatcagggtctgtgccctgagtgggttctgaggcccattctcaccttaagaaaggcaagaattgaaaccagctttttctaagcattattttaataatacatgttcagcaattctaaatgttaggactttttagaggttttcagacatcttctaaaagcaggaccctttgtcaaatgaaaccttataygtatataaaacagataaaaagcaggacaaagccaaggagggtgccaagagttccaccttccccaacaaggtttggaaactgcagcatgtgctcctagaagtaaaggccaggagcctgttgctatcattttatagcattttaattccttggacttcaaaagcaacacagagctagaaatagacggactcagaacccctgtgggtaggagaatatgaactctttgactagatcccagaaataaggtgctcttcctaaaggataaagcattttttaaggcaatcaagggatctttacacaataggggatgaggatggtgcaagctgaaaatagaaatggtgtattgaaaatctaagtaggcccaaggtgggcttcaaaggaagagttgatggtttgaggagactgaaactgtggcgagcagccagcagccctgggtgctgctgttggagctgggagccgtggtcatatacttcggggtggtgtgtctgatatgctgagcttttgttagcagcaagagagcgcgctctgcagccaggccatgtgggttttactcctggcaccatgtgtttctagttayatgacttgggcatgttacttggcctctctatgccttagtttccttgtctgtaaaataaggatgatgctaatagggcctacttcgtagggctgatgtgaggatttaatgagctaatacatacaaagtgcttagaacagagcctggcacatacatagtgctcaataaatgcaaactggtactgttgattatttaatacattatgctatattgtactgtaatacactactttgtagtataattatttggtttcacgagaaaccatttgaatctttatctcattcagcctttatatgacaccagaatgacagtatcatcacaactctagcaaccacatccatacagattttgtgccagcatgtgccagacacatcataatataacatctaattctcacagtaattccaggaggtggtagtaataaccccattatctggatagtggaaaccaagactcacagttatcaggctcacagattgtggaatcaagatttgatacagtttgatgtgaggccaagtctacaccaaccatgcttaccagggcctcaggagacagaaggtgtccagagctttgcttcccgtcttcttgcatcatcaagggctgctcacccttcctgcagctgcaaagaggagttgcagggcctccttcaattatgggtcttaagacatcacagctcttgccgccatctcggcagctctcttgagatcatactaagatccctgcagctgctgctgaaaccctctttgcctgtctccacgtcctcttagggaaaatagttacccaactgccaggcataaatgactcttgatcaggtttatttgaaggcttttatttctcccctgaggctcaggaattccagccagtctttaaaagttaccaggtcctctgtaagccttgctgggcttcctttcaaacaggaaggtcctgttcaccaaatagaccttgctaaatgctccataatgcaraggctccacctggcttcacctctatatccctagtaacctgctggacacatggtcggtgcacagtaacttccaggtgacagaaacaatgaaggaaggaagggaggaagggagggtgagtgtgctttttattcctgtgtgtcaggaaccaggaagctcatcttggacttcatgatttggaatacatgttaccaaaattgtctgctggaaagcatgctaataaaactgcaccgccccccacccccaccatataggcctttctgcagagatctgcagttcacagaaatccagaggtttcttttttgcctgctgttgttgattcattcttctactctgaattatttgtcagctggaacatgccatgggctgtgtggtcagttggggaggacaatagctccaggtccccatccctaccctcaagtagctgcaagtttcatggagaaggcagccaagtccacaggcagtaagtgccactgctgtaggttcagcctggtaatagtgaagcaacaggatgcttggggatcacatggcccagcccgccgagggaggacgggggagaaatggtagagtgtatctgaaggcatcttgcaggaggtgagtcctgaaggcaaactggtagcacagactgaaggctggacaagtccagatgtgaaggcctggaggggggagaaatgtcatggggaatgataggcacttgactgaagagagggatgaggtaagagaccaggctggaggaggagattgcagaatgtgaaaagacgctgaggctcggctgaagaattccagtttgattctgggataataggaagctaaagaagggctttgtcgcaggctaaggggcagtggaactgtcagatgggtgcttagaaaaatcattccaggaatcttgtgttaggggcatttcttattaaacattctccaaatgttcctaaatgagcaataaagggggcctattttgagtttatctcagagattctattgaacccagaatgttcctctgatgccagaaggaagataggaagccaagaccccattggttcacagattgggtctgctacctcttttagctccagaccccagtgttttagaggttggagtattcattattttttgcagctagacgaatatcttcaaagggcagcgaggatggagaggaggtgttcctggtatgaacaagaaagcctgcagctccgaggaggcccttcccatcccttgaatggtaggagcactgcagccctaattaggccaatatctgccttcagagttctccatgtgatctgcaaggagaacacagaagcttttaccccagaaacctttcagggttgtccgtcatgctcagccaaggcagtgggagccagacggagccaacagacagcaatcgagggcacgccgggcttcagtgtgcagttgagcagtcgccagcaggaaacccacctcatacccagtcctccctgggtacaggcacccaatgagaaagactcctggatctaggaaaaccacttgctcttttctcttaatgtccccacttcctttactgtactgaaaatgttgattcagagtgcatgctcttttaaatgagctttctyaaagagacgctgtctccagcagggagaacttctttgtaatctaagatcaagcactgttgttccctatcctcagtatgtgtgggcttgttaaggttttcattatgcatttcttgggaaagtcttttgtattagcctcaggtcagagagtatagcaggacttttttgaaggaatggcaatttcagattgatttattaaaaccatacatatgctcttgaattatattttctgtttcctgtaaagacactgtaaatatatagcatggtcacagtcatgttaatttgtaaagagctgtgtgattcatctgagaagcattctggagagakggagggtaaaaaaaagagttaactccaacaatggctgtggaatcagctgaaggtcctaggatgtctgttcatcagagcccagaataagcccactatggagtgttctggatgcaaggacaagcctgttatgaatctggatagtccaaaggtgggagcaatggtagaggtgacagattgcaaggaaagagggagaaattgaaaaggggagaaggttggtactagcttgaggaatgtttactcttgagaaatcaatagcttttgtttacccagcctttcctgcacccagagagactaggcaggtaatgattaagcacagaaccctagcagctgactgcctgggttcacatcttagctctgcttgtcactgtgtttctgaccttgggcaagttacctaacatctctatgctctttcctcttctgagaaatagggataatgcaacctacccatcaggctggtgaaggaaaaggtagtttgataatgtttagcactaagaacaatgcctggcccatgtgggtgctctcaaagccttcgctacgagttgccgcaggagcccagaaaccaaccaaggtgtgtttttcaaactggctcactgaggtatagtttacagaccataaagttcactgcatataaggacacaattcaattttttttttagcaaattggtagtgttacacaactaccaccacactctagttttgcagcatttccgtcaccccaaaaaactcatttgtccctgttagcaatcaatccttgctcccaccccaggcctaggaaaccactgatctgtttcctgcctttttagatgagccttttctggagatttctggctttcacttagcatratgttttgggggttcacccatgttgttaaatgtgtcagaactgattttattgctgaatagtattccatgtatgtacagattaatatcacaatttgtttatccgttcaccaattgataggcttttgggttatatccacgttttgactaatgtggtaggtgctgttgtgaacattcacatgcaatctgtgtatggacctgttttcgtttctcctgcgtagactcctagaagtgtgtgaataaggtagatttctgttctggctcttcaaaggtgagttttttgctcagtggaattttgcatgtgtagagataatccatggagattgctgcctactgctcagttttataggcaccgtcactgtttcttttgtggaaacaaaaattcacactcacttctgggaaacaacctctggggccgtgtgtggacacagttcactgtgttttaagggaaagcacaygccgagaatggtcggtttcagcctggcacctgaggtgtgctaatccagtcagttactcaatatttatggaacacttcctgtgccaggccctggatttctcagctgtaacacagataaccaatatgtgccttatccctcaaatagctgaccgaacgggrcccaaaccccattttcatggtcctacctgtcctaccaacttttttttttttttttgccaatttctggtttttcttcctctagatcctgcctgcagacatttatatttgaacctgtgttcttggttccagacaatgtgggttcccaccaaaacccacttgcaccgaactctcatgggcttattagtaactctgtgaaagagttggctgcagtgggtggggtgaggggtttctggacccccttcacacaccacttagccctctctgactggcccttctgttaccactcctccgctttgctctgaacaagtgaccctttccctggcccagcaaaccaagagggcgtgaacaagccagtcccgctacctggcgcttctcccagggagcattctcctccccttctctggccccttctgtatttttatggtgttttccccaggctgctaattaattagccttctttacaaaggcggtgctctcacctcttcttcagggttggctgtgttcatttgtttagaacattgttccgtctcataaattggttggttattagactttttgttggtttatgactactgcatggaaatttcaggatagtcaagcacatttagagaaatttggtgactggttgaaataattgttagggaaggatgcagatgttctgtgttctaagcaggcttgttaaccagattggaaattactgtttatatctcatttttgctgcataggagctcgttgagttagaatagtttccttttctacttctgctactgtcaaagcctcaagatgcaaaacacattcagtttagttgagcagctcctgcagtctgttcccagcaccagctatctgcaaagcgccatgttagaggtaagctgctaacttccatacagcctacaaaacccagatggccttccctatctcctggaagccttctctgactgctaccaccactttccccttccctagagttaatcttttcctttctgcaagtggcctgcgcatcctatttgggcatttgtttcatactgttcggtaattttttagcatcggcctctcttactagactgcgcactgaacctctgagtccagggactgtgtctccttcatgtttatatttccagcacccagtgggagactttaatagtcattagtaaagtactgaatgaatgaggaaaccttcaaagccagcttacatgagtgtttcatggggatttgttgaacagagatgccctgtctcagggtctcagtcccgtatctctctcctgtgctgttgcggcagcttcctgtctctctgctgctgctttgctcctgcagtctgttcccagcatgcagatcccgtcacccctcttcccggaaatctccagtgtcttccatcttacttcatggaaaagctagagcattcaattagaccccaaagatctgactcccagggccctcctgaaccccatcacttctgacccataatatacacactctaccaagctacccagaagcgcctgctccccctggaatgtactcccttgtcaaatcttctgatctagatgttcctctgcctagaatgttcttcccagatgcttgcatggctcacttctttacttcctcgtgtcttttcccagctgccaccatttcagtgatgccttatcaggacatcatctctgccaacagtctcacttcattcttttctagaatacttaccaccttttaatgtactatatatattgacttatccattgtttttttgtctccctcgctgaatgcaagccctatgaaggcagggatttgtggttcctctggttcatcatcctttccctcacactccagggactagattgcatgtcgtcatggtgacagccaacatgcagatggtgtttttgtgtcaggcgcttttctgagcatgttatacattatgattaataaacggaggaggtaagagtccaccaggcagtctgagctctgagcccttatgcttttctgcctagtagcaagtatttgttcaaagaatgaaggaatgagtacttatgataaggagataaggcaagttggcactgccttattagcctgtgttgcagttgaatgaaacagaggattcccagccttctctgagcacccaatgggactggcacttatgggagagaagaagctatgacaggggcttccatttcagttgtgccctaaaagcagctgggccaaaaggtggatcttgtggatgtaggtgaattatcatatgtaatcagccaactcaacttttacctccagactcttgcagcaaagaatggtcaaccttggaacattatctttaacatctcaaagttctttcttatcagtcacctcattttcttctcacaggaattagataaggagggaaggacagatggcatcatcctcattttatgtgtgagagcaggcagagctgaagagacatctatgaagtcccacagctgggagccagaatcctaacccagatccccagctttctcctgccaccttcaggcctccctctgttcagtgtgatcatctttagactctccaggtggcagcaagctttgagaagttcctgctgctatttttactattcctgattctgttgacccccaaaacagactgctgagaggatgctagaccatgctcctggggagcaccagaaagggttcctggagctccagtgttcagctgcaggattgaactaagcacacctgttgagggggaccttgagaggggaggctgctgtagtttacaaagaaatgaacaaatagggcatatcagccctgcagtgcagctttaaggacatctcccatggtttgggccttgcggtgccatcctgccctgctggacctgaggtgcaaggtgtccattcatctagggctgccccagattctgcagatgtctccaatgcagtaccttggaagctctacggggcacaggcagctcttccaagaagggctaacaggtggaaaaggagcatttatggagcacctgccatttgccagcattctgctcagctccatgtcttactatctgttagcctcactctttgcagacaagcaggagatgagaccagactgggtaacacacccaaagcaccacagtggtggggcaaggctcccagtctgctccttctgacttgaagcacattccatcgccatatcactcatcacttcctccttgtcaaacaaagcaagactctgcactagcttcaggcttttgttttgttttttgacacagagtctcgctctgtcgcccaggctggagagcagtggcgccatctcggctcacggcaacctctgcctcccgggttcaagcaattctcctgtcttagcctcctgggtagctgggattacaggcgcgcgccaccatgcctagcaatttttttgkatttttagtagagatgggattttaccacattggtcaggctggtctcaaactcctccactcaggtgatccaaccaccttggcctcccaaagtgctgggattacaggcatgagccaccctgccyggcctctagcttcagtgttaacctttgtgctgcttcctgtaccccatgaggctgaacatgaataagaagccaagtttctaaagagtcttcaaactcagtaggtacagagatactgccctcagctgtttgtagatgtcatgtaagtagagatgttccacagttttcttgccagccatgaaagcctaaacaggagctttcagccttcgtgggtcttcattttcccagcctaatccaggactgggtcaagccaaatccaaggtgcagagagaaacattcccacttggcttcttctgatgtaaatgatgtgatctggtctagatttcccrgttgacttatcttttctgttcagtcacatgatttggtgtatgtggattttaaaatctctttattataaaatttaaaggctgcagaagttatccagttgctcctaaagaattacaggttgagcrggctgrcatggtggcttacacctgtaatcccacactttgggaggctgaggcaagcgaatcccctgaggctaggagttcgaggtcagcctggcaaacatggcgaaaccccgtctttactaaaaatacaaaaattagctgcgtgtgatggcatgtacctgtaaccccaggtactcaggagactgaggcaggagaatcacatgaacctggcagagggaggttgcagtgaaccaagatcatgccactgcactcctgcctgggtgacacagcgagactccgtctcaaaaaaaaaaaaaaaagatttacaggttgagtatccctaatctgaaaatccaaaatgctccaaaatctgaaacttgctgagcaccaacatgacactaccatggaaaatttcacacataaaagtactttaactttgtgtaatgctcaaatgtatttaaaatatttttwaaaattacctttagcctccatgtttaagatatatatgaaacataaatgaattttatgttgagatttgggtctcatctcaaagatagcttattatatatgtaaatattccaaaatctgaaaaaatccaaacacttctcatcctaagcatttcagataagggatattcaacctatataaacaaagytgcttgcattagccaaccagaaaaacaaccaaaaaacactttaccttttccaatgcccatgcccccactcagctctgatcatcagtaactccattgatcactgtgtgctttcattcttcctgtctgatgacagctgtcccaatgggatgggcagagtgtcaaaggccagccagcaggtttcctgtcacctaagaaagcaacggccaccagtgatcactgtgcccccattcagggtctcacaggtctgtacagtcatgctgtctgccttagtagcagcattcagactcaagttacgttgcgacccatggcttaacaggggcctggattgtgatgaaaatcaccatgaatataaggagtcatttgagggtcttctgtctagttgtctgtctctggtggtgcccagggctgtatgggtcctggggcactctgcttacccactcacccactgtgcatcattttcagaagagtaagctgcatcctaatatccctcaataatccaatatgtttcttttcatctctgaattattagaccttcctggaattctatttgcagctgataggaatccaagttctaggtttcctgccaactcttcagtgaagcattttgctcattaaccaccaaaactcattcgggctggagtagtcaaatcccctcatcataggaacacatgagtggagggcaacagtgggtttgcctgccttgttggaatcaggatccttgatttaaggagactctaagagaagctagcaccaagtaacctagtagtaacctatagttgcctttctcagcaggcaatgcctttctcagcatttcctccttcaaggagatgggaagaagcaataaccctaagaaatcatcagtatcatcatcttcctttttctgatgaggaaactaaggcttcagactgttaggtattttgcccaaaggctcacatagctggtaaaagcaagaggcaggatgtgctctcagggccagctgcccacagagccttcggtgggttttgctttgctccttcttactgtcttttggctcattaaaagtaacacaaggccgggcgcggtggctcacacctgtaatcccggcactttgggaggttgaggtgggcagatcacctgaggtcaggagttcragaccagcctggccaacatggcaaaacctcgtctctactaaaaatacaaaaattagctgggtgtgggggtgcacacctgtagttccagctactgaggaagctgaggcaggagaattgcgtgaatccaggaggcggaggtagcagggaaccgagatcgcaccactgtactccagcctgggcgacagwacaagacttcgtctcaaaaatatatctatacaagcacaaggttaaaaaaaaaagaaaagaaaaatggcaacagtatgccctctggatgcagctctgggccagcccctcttctggtgctacacccacctccatgccaaggggcccgcctggcagcatgagaccctcatatccctgtggtggcattccacatgacagacaagggagggacagaaacatttcctcggcttgcgtcagtgctaggagccctgggccctgagattactgatcaactcctcctccgcacagatctggaaaggaaacgtgaggaaaagtaggctactctagaaggacacacattgaaaagtacatctccttaccactcctggtgctggtactccatgttactgctcagtggcagtcctccaaccctctcctcacccccgagtcctccttagacctgctggtttcctctattccctctagatcccagggtcaactggctctgccccactcggagcacttaacacacattcttggtagggggtgccatattcctgctcatcctatcacatgctacttagacttctatttctccagttcttgaatatacgaaatgttgtacagaagatcctcaaataatgtcattttgctataatgttkagaatgaagaaagttgattcctggtcgggcccactgtctgtgtggagtcagcccattctccctgtgtcttcatgggttttctccagggtctctggttttctcccacattccaaagctgggcacctgaggtgaactggcgtgtctacatggtcccagcatgagtgagtgggggtgcgcatgaatgcaccccgcgatagaaccatgtcctgtccagggctgcttcccgtctggcaccctgagctgctgggataggctccagccgccctcaacactgagctggaataagagcgttcgaaaacaaatgaatcgatacaaattattgtacaataaaacttcataaagtctacgataatcatacacatgcaagaaatcagaagggaacagaccagctggtggaggcaggcctgattgcggtgccatgttagtgattgattgatagtgaattatgaggtgggaggaggcacttcttacgattttcacttcgcaaatgtgtattcctcgattgaacccaccaccacaactgccgtcactcactgattcaccaaaaattgagtaaataatttatcttatttgtatttattcatctttcttaaatgtgtgtatagctcacatttgtttcaatgtttaatattagaagtgttttgggtctttatttagaagtttggtgatgttttttgacaagaaatgtaccataggaacttaactcttgttaatatcaattagcctgttgtaaaattggtttctttatattgtcatttcgcttaacgttgcagtttctgagagactattgacgacactaagtgaggacttactgtgcttgttttcaaccaaccagcactaagtccctaccaaagacacagcaccatatgaggtggtgtcagaagtgtctgcagtctccttggcgtgatcttcacctcacagcgtcagaaccttgccattgagataaaagtagcgcttatgaaacagtgtcgtattaggtaactgccaagatagggtagacacagtgcctttggaatcagagaagagaacagaccagctggtggaagctggtctgaagatgggccttgaagagcagaggctctaaatagcctggctgcataagtgttgatggtgatgattgagaatagccacccttcacgggcaggcgtggtgccaagctcatcacaagtatgacctctcatcctggagccctttgtggaaggcactgctgttggtccctgtcttgaggttgagtaagctggtggttagggaggtcaagacctgggctgaaggcatattccagctgagccccaatccagcccatccatgtggctcccaactcttccccgtccctgtgctctcccagtgtgccgcctccattgctagggtggttggcagggctggggatccccagctgtatccttggacctgtggctgatggcttcattgtcgttctaggacttctgccatgggcaagtgatgtggccacccctcagcgccctacaggtcaagcttgctgagcccgggcagtcctgcaagcaggtgtgccaggagagccagctcatctgcgagccttctttcttccagcacctcaacaaggacaaggacatgctgaagtaagtgccctggggtgggggtggggactcagcccctagactccagctggccttgttgggtagtcaggtgagaggtayaggtttcctcttccaagctactgggctgtggggataaggtgtgggargggagtaggttgcagcaggatccccctagagagttagcccagtgttgttaccgttccttttgggtgagatgaagtcacctggcatgatgatgtgtttagaatttraatgggagtgttgtatttgcataaataaagctgtatctgggtttgaagattgtgggaggtgttcggcttgctaatgttgaccccaagaacagtgggagtagaggtgggcacagagccacaggtatagatggaccagctcctcagacccctgctggtagccaggcctccagcagagtctgagcagtgcaaggggctggtggcaagtgacattgttcaaccctggagtcagaaaggaatgagaaacatggagaaggagccggcacaaaactgcccacaacaatctccaagagcagccttctcctgcggcctgttcccttttgcactttcttctagctcactgacacatggtgcatctcaggccccagcagacctgagtctgcggggyctcttggtaatgaggcgagtgtggcactgggaatgctggcccagggctgcacaggggaggcgccttccttgaatttcttaccttgtgcttgcattacttagtggcacctttcctttccctttgcattggcattttgagttgggcatttgcagttcccaaatttccgtgtgaggtttcttctggcctctcacccatgatctttgacaggcttgaatccattctctcaatttttatcacaccccaccgtagtccacatattgcataattatctagcctccccacccacccaccaccttagtagctctgattaggtgttttatgcaagagactagcctacaaataataagaccctgctgtcccaactccagatattcgatctagcaggtgtaccattccaggcttgaagaggatgtttaggaagtggagtggacctggggctcagggctcacctgtccctgttcaggcktcacgccctgttagtgctgttgtccrctgttgttatttgtgcaccatggtctgagttggcctgtttcttgtgagtcgtcttatccttaagtgtggtataaaacccttcgtagggagagtgtgtggcctcttgtgtcctgcctgctgcagggaagctctcatgagtaggggtgtaagctatgtttttttttgttgttgttgttktttttsagacagggtctctctcttttgcctaggctggagtgcagtggcgcgatcttggcttactgtaacctccacctcctgggttcaagcaattctcacgcctcagcctgggacaaatagctgggactataactgcacgccaccatgcccagctaacttttgtatttttagtagagacagggttttaccatgttggccaggctggtctcaaactcctggcctcaggtgatctgcccgcctaggcctcccaaagtgctggtattacaggcgtgagccatcgtgcccggccctggtgatgctatttttttcctggtctttttatgagaagacccaggcacagaagctgccctgattccaccatgaaaacaaaagcataggtcaaaagtgggggcttggggcrgcaccctgctctgccaccaggcaagctttaggagggggcagtggtccaggatgtctggaaagcctgtgatggtactggaagtttccagttccacagcgcaaatcttgaattgtagggtcctgtgaggggctttccatgcgctccttttgcatatagctcttggagtaaggtggattcttgagaaccctgagtctgtctgcatctgaagttggaattcactagttacagactagggactgtctgcataagcccacttctggaagaagagatacgagaagccgcatcctgggaatgggtccaaatgggactcctgaacagcacggcttccttcctggccaggcaggagtcagtgctcttggcccagggactgtgctcagggtctggctcagagctagcatggggccctacaaaggcaggccacctccaggccagggtccaggtcagggaaggcaggaaggagaaagagcaaatggccactcccctcagttctgccagttttctcatctgtaaaatggggatatcctaggtgataggtaagataatgaacagcccttgccaaagacagagtagaacacccctttcttccagagagctttgggcagtggagtaggcccgaggccactgagccaagacggataagccagccccagccctggcccctccccacctccgtatccatgcagagttcacgagagcaaaaggacttggcgtggggctgtcctgaggccaggccctgtgccatgggatcgctggaccccacccccacctcctaccccactgtagagatgcgggctttcttagcaggaggctagaatgaatgctaattttgcaataaagccgtctgatattaattctctgaacataagaaccctgctgaataacttgttcatgcatttgtaaatactgataatgttgtaaaacccctgctatctggcagtctattgagtgcctcctcagtgtggaggtgatcctggcccatccatattcatagccaattagcaattagcagttcctgcaagccagtgctgcctttgcatctccaacttggagcctgctttgagctaagtttaagttcctttttcagtctttgggtatccatagcgtttaagaaccacctgtcctcactctatagtatgactttagtatatcacatcaggggaaccctttggagtgtcctgtgttgtcttgaatcagggccattcaggaaaccagcctcgagttcttgtgcatgcagggtgcaagggcgcagttaagcactgaagaggccaccgcagagcacgcrtgattcaggtgcgacccacatcctctggacaagtctcctcccagactggggtggagactggaagatgcaggctccaggaagtgccagggtccattccagtggggcccagtggagaggacctcagttccatacacaggaacatgtgttcctgcccagtttctaattttgctacctcttaaagttgtttcttctacaatgttaaattattggcaactggggttgctctgtgcaaagaattctaagcagtacagtgtagactgagtgctttggtacctgagagagggaaggtgacccttagtaggccacctgctcagccccgcaccatgttgctggggaagacagtgaccccagccccatcaggcagggccaagggcagaagtcatccagggactctggcaagaccctgaactttttggtagaaggttctgatttggtaatactcctgctgcactcagagcagcccagtggagtctttgccaggtgggacctggcaaggcagagctggaatgaacagagccctcaagagagggggctaagggagggaaggcactcaagggaaggggcaggagggaggggcgggagcagcaggtgagacagcagcactcgcctcctgtccagcgcatcctgtcctgtgcattataggtctgtgtcaggaagggactggtgacttctcagcccagtgcctgtgacttcartcacagcgtggycagccccattggagggaggctttgcctttttttattcttcaagagctataaactgtaaactgagacctgatgggcccagaaactttaactaccatcctgtaagaaactaggaagaaaggaaaggaagatggcacactgcrgtggggtctctgagcaggaggatgtgcttgtttgtgagacagacactgcagggacagagaggcagacatagcaccatgcactgcctggaaaggcagggaccccctaggggttgaggatcctgggctgcagaggctgtctggtctccatgtgctctagcgattggggaaagctgctttgcctcactgatgacctttgctcccaaggataatggagtcaccttcctgactgctcagrgctatgggatgggcacatgcatgccagtaaaaggsagagctcactgggggcttagaagacactggggccagggggttggttagagccctgcattccacagccgaatccatcagttgaacccttgaggagctgcctggtgtcgggtctcacctgtggcctggtgaagcgtctgctgcttgagcactctgcggcggtctctgtgcatcaccccaggcaggcttctgctgctgcagccttagctgaatcctgctcacagacacacgctcatgtgtgcttctaccccgggagatggtggcctagagcctgagtccaggtgacccagggagcgagcaggagggtttttcatagctcctgacaattatattcctcgccatggggtctgagagtcgccgtagagatttctatgctctggttagcagtgtgccggcagatggtttaagtaaagccacagcagctgctgtaattcacccaaaaaaaaaggtcataaatataaacctgtatcccaaggtcatgttccatatgtaaacttgtcattcagaattgagttccagatatttttctctctgttgtccagctgaggtattctgtgaaggagctggtagctgcaagtctctgactcatttttccttttaggaaatccataaaaattgacttcctgccctctcccttcatgattcatgaccttaactccctgggcattaccatctcccagctggcatcaagagcaggggtggtggggtatttagggtagttgcagtgctctcccggtgactgtgggagcaagagaagagagtcccgctctcctgagcaggtctgggctcctggtgcagttcacacgtgcaggaggcgccgcaggctctgggggagggaggcctgagcaccagtgacatgctgagttccagaagcagttggggcttcagctgcaaytgagcaggagccaggctgacagcctgggagatctcagcagaagccccagcagatgtgcggggaatcgcaggattaatgttggcaaggggaggaaggccccaggcagctggttagctagagaaagacagggcaggagtaggagagaaaatgatgctttacatacacatacacatatgcatacgcatgcacgcacacaaatgcaagtacataaacatgctctacacacatgcccatgtacacacacatatgcatacatacacatacaagcccatttggaagcttctcagaggcaacgagaaacctcaggctccccatcctcatcccctccgtgtcagcagaaaaatgagacttccatgaaccaagtgaaatagaaatggttggtgtgtaaattcataccactggacaagcaagtggggaggtggtatagcccatccgatgtctgccaaggcagggtgatgacgacaatgaccacaatcctgacaacaatgatggttgccatttatccacttacttagagcttgactctgtcacatgctgtagaagcactaacttaattcctgcagtaaagaatcatttatccccattctatggaagggaatctgagccacagagtggctcactcatttgtccagggccacacagctcctaaaagacaaagccaggactcaaacccaggtctgcccgtcccccaacaccactttctctgatatcagatacagcatgggttcccacctcgcattcatgcaggacaccaggtgaggccgctgcctccttcaggaagcaaggtggatgggagcagtcatcccaagtgggagggaaagatatgagataagaggccaaaactgttgggaatggaaacatcagaatatccttggcccccctacgcagtggtcccagccaaaggaagcaaagccaccaggctccaccgcctgagaccactcagctgttgggagaagatggcagaagtacagggctggggagagagggcctggattcaggccgtctctgcacatcctgaagcctcagttcaccttcctctaactggggttaccattgccatggcttaagggtggctgcaaagacccagggaggcgatgccccaggacagcaccttctgtctgatagctttccagcaagaggctaaggccatataacaggaattctttaaagcctttmattaaaaagttaaacatacttaaagaacgtaaatgatgctgagctttgccccactctcacttcttggaagcagccattgctaaggcattagcacrtagccgtctcgacttgcagccttcamctcccgtgtgcacactgcgggctggttcccctgtgcttcccattctgggactcacctttccccaggatgactctcctgctcctctcttctccctcattctttttcaacagctgcagagaactctaaaagcacagaagggccatgatttatttggccattccctgcttggtgagtatttgggttgtttccagtttttctccattgcagacaaagcttcactagkcagcctcaaacacacacccctgcacacactccctggtgcacacatgccttcctgagtctagatgcctagaggtggaggattgcagacgaagagggtgggcaccatttcatttctaaagtaggacaagacaactgaacatccccccatgcctcaagatgggggctcacagggccagtgacgaggaaaggctctgtcccttcatcaccaacacttgtgcctttctcttcctcttcaggtacaaggtgacctgccaaagctcagagctggccaaggacatcctggtgccctcctttgaccctaagaataagcactgtgtgtttcaaggtgacctcctgctcttcagctgtgcaggcgcmcaccccaggcaccagagggtctgcccctgccgggacttcatcaagggccaggtggctctctgcaaagactgcctatagcagctacctgctcagccctgcaccatgctgctggggaagacagtggccccagccccgtcaggcagggccagggacagaagtcatgcagggactctggcaagagcctgaactttttcgtagaaggttctgaattggcattgcccttgctgcactccgagcaacccagtggagtcttcaccaaaacaaaacaagagcgtatgtcaggccaggagcctggcttgtccctggcacaacatcatttctgtttctcaaggagcaactgtgggaagactgtcactgcagctgctccagggcaaaagaaagtctcaagagtcctttaaaacaaaacaggaggaattgagctgatgggaaagaactctgaatgggaatattcctaaacccattaacttatttattcgggtgggagggaggggaccgcgggagggagaggagggattgatcacaggcttcttttatttccactgttaatcatccaccttcactatactgttgttctgtctgctttgggcagggtgyaggagagagaccgtgtgccgtggggctggtggcctgctcagggacagccatggggacctggcagctcaaaacagatggcagcagaacaaaagaaacttttgctttggaagcacagccaaactccccagggcatcgtcatagatggcacctagagcatgggctgcctcagtcagggggacgtgcctgtgttgtccagagagcccagccagggacgaaaaaggagatgaggcccctttcctccatgtccccatgcccagacacataccttggccgtaatttcttttagaatccctttgggaaggaaatacaggattgagggattttggagtttctggtaaactcaccctccctccagccccgctatgaggaggaaagtagagatgaaagactcacgctgttcatggacttggagaggattatctttgagccaagatttggacaggagtgaagtcggtccttaagaatttgtggcgcgaccggagctgggctcctgacaggtgggcttgtgttgtgtcccctctgatggcaccaaagtccagggaagggggctcttgatgtctgctgggggagtgggggcagctcaggatgaatgcagtgccctgtcctggctactcacctgagggtgtagctcgcaaaggtgggaatctggtgctggcttttccttcaggcaggatcactctgacttgttgagtaatcagtcatcaggttggcctggtcagacacactggaccccaccttccaaaccctggacccccccatgctctgcctttgtataagttcccaccccactgaatcattgctgccatgctctgtacaagtttgtaagtttctgaaaagcccctgacatctccatgctgatgcaagtgagaccccttctgcctaatgtgagcggttggcgtcctccacttggcctctgctgggcgcctcagtcgctcaatgatgtgctctgtgccggggcttccaagcacccttcctgctaacagagggcggcccagtggagcctccgctgggcagaactgatgggcaaggygtaatggctggtagctttcagaatgtgagggaaaggaagaattccgcttcatggggactagagttagtgtggggcctttaagtctgggaagttacattctgcttctttctcagttgctacacaaatgtgcagccagccttttttcttaggcccactgagatccctgctcagtgcgtctcaattgtatctccagtctaagaggagggtggggggcacccggggcctcctccactccttaggtggcccccgagcacatctgccaggtagagtaccatggggaggcctctgccctgagcatcatcacaggggcgcctccagacctggctgagaatagcctctgcttgggcctaggaagaagggcagaagtccaaaggaaaccttggtgagtgagtgtgtgtgtgtgtgtgtgtgtgtgtgtgtgtgtgtgtgtgtgtgtatgagcctgtgcatttcttttaagcaagggcagtttcctgcagtaggagggcagatgactggcatccttgctgtaaggaagagctttttccttgtgaatgggcctcttggctgtaccctagggtgtgggaatttgctagagttccctgacctgcaatccctgggccagtgccgccctctcctgggctcttccaggagcattgaacactgaggatgtcaatgcaagtatctgaccaacagggggagcctgcaggccgagcaaagtttaacccacttagccactgctacttaagcaaggaagctgaaaggtaaccttagccctgccttgtgttccaaaagctgcaaggatcatttgctggctgtccctaagttcaaggcctccctaccttccccttcttttccaagtcacaacccgccctgcccgggccagacagcccagaagaacacttttctgccatttaaaaatccctctttcatcccccccagtccagtattgagtggaagtgcgccggagttccactgacagggcagctgctcttggagcaaacaagcccacactccagttgtttagggcattatctgaagagtcagtgacccctgaatgtgtactggctcccaggcctcctcagacttggcccaggtctagtcagtgatcctggagaggaaactggggagggggcttccaactgccctgcatggaagaggagaggaaggtgcccctgtgtgggctggaagcctgcagaggttttgccrttgctgatcttgatagaatcctaaaccgatttatagctgataacagttccatggggagagaaatcctaagttatgattaatgtttttccccgctataatatcttgcctgtttttttggattattttccccattgtgatcctaagctcttaaaaaacttgagggaaaacattcatctaatttactaaaagagaaagctttccattgaaaggtagatactttgaggagtaaaaagacttctttgaatgctggtaaacaccgcatttattttgtgtatgcagtttgatttgcacatgtataaatggagatgcttttcatttttgtttggactgggtttgtgtcactgctcattacagtttgcttttttgtgtgtttgctgtgcgtttggagatattagtcagtttctttagtgatatttgtttccttgatgtgccttttcgtttttctttggggtttttggaatccggatgctgttgaagggcaatagcagactcctccagctaagagacaggacatgttcttgagccactgtagctgttgaagctggacaccagacgctccctataacccccccrccaggccatagcgtgtatgcatgtgcacttccacccacagaggagggtgtgaagccttgagaacctcaagaaagggctggattctgccatacctttgggtctaccttgggactgctggttgccaacgtgtcaaccagcctgtgttccctgccacccacgcacttgctgaggtgtggctgaggcagaatcatgtgaatgggtgcatccaaggagttcagggccctgcttggagaagaaatactttagcatcatgaaagggaaagaacgtgcaccccttttttgtttctttagtgaatgcaagatttaataaaagtgaataatgagcttcccctttgggagtggagcccagtgcagctcactgacagggttgacatcagtatgatgtgttggactgaaactgtatgtctgtaggtaggtgtgtgccttttagggcagaccacggtggccaccccatttctccaaggtggtttacctagcttgtgtatattagacattgccaccctcacctctggccaaaaattcttgatttaaaaagaaaagtctattttgttaacgacaggctctgttgtatgtgttactatcccaagcctggattattttatttatttaaaagtattttaatttccatattggctttattctaatcccatccatccctgtggagctgcagagcatcttcatgtgagtagacggatggacataaatagattcatgctcatttaggaagctgggagtttcgtgaagctgagggtgagttcctgtgattcttgttcgcttcaacaaaaagtgggagaccaagtttttatagcaaaagaccaaattagctgtagagtcttgaatgcagaaaaaaattaccctagctttcttagcacttagggttttgtgaggattcagtgtttagcacagtgcttggcacatagtaagccctagtaaatgttaaatattgttattagtgtttcgtaaaacttgagaaatagagctgagctcattcccttcctgttgattcaaaaataatacctacatgaaaacatgattccaagttgattgaatgttgtaggaattactggtttagagtagcccagttctcggcctaccctgctggttgggatcttactgtattcttgaatgcactggtttgaaaatatgccagacttcagcccccaaggaaacaaggctgcaagaatttatgaactccagctggaaaaggtaaaggtgacctttggctagccacatactggaccttaccccactgacgtctttcagaacattccaagggttttcctcaaggaacatttttgagctagaaattaaaatgggttctctggcagactgcaccccttgagtcaaagttaacagtattcctttgaatgcaataatagaggcttttctgcgttaagggagaaggaatgaccaattgaacttacacattccccaggcaggtccctttgccggcccctacaggctggggtggcccctcctgtcctcagggatcagactcccagactggttagttctgcatgtttccatcaaattaaaggttattccctggccgcctcctggagaaaaccaaccccaccctgccagctgggggcaatggggcagggattttggcctctcagaacagctcctagaggctgctcatgactgaatgttttcccaaatcacctaaatatcggtttgctttttgttttgggggagaggatttagcctcttacttccctgatggattcaaagttttatctatctccttatctcctgccctgtcttggcacaactctggatagattgcaggtgtggaatttgctggagtttggtgwcttcstcaaattcctttggattctgttccgccaaatcagcagtctcgtcctgtggatgcagtgactggaatttcccatctgcaaagcatctctgtagcccagattttgtggagccttaagacactccctcaatgccaccctgaccccacggctggagaaccctgtgcttatgtggtgggcagggccactgttgatggaggatggcggggacggggtggtgctcaaaggatctgtggtgctggaggtctacacgcctctcaggacagcgtgtcaggaacctcagagcagcttcacatctgccaaagctgagagggagcgaacttgggaagcattttgctcattgtcctacccaagtattaatagcataatagttgatgccaaaggagatggtgacgtcccttccactgtagttgctgtcacaaccttgacgtctttaagctaatggccgtttgcatctgtgtcttcaaacagatcctggttacagccattttgtgtgattcacttcgggggttaagtaatgcaggattctgcaaacaaggtgtcgccgtccaaatgtactgtcctggcatagagagcactgctttgttttccactgttgtagagaaaactagggagaactttatttttcaataaacttttcttgtgtgacaggtggaagtgatttttgggggggcgggtgcatgcagggtcacctccagaacaaagctgagctgctgtctaggcgcgtccccagcacacagcttcccccagctgtatttcacggtttgcagcacactgttgaaactgctggtaggaagacaggaaggtatacttaaggagtggagaggggaaggttttactactgtgtattccttcccttatatcacatccaccactactcatgttagcgcactctccttgtgctgccttcccctagaaggaaattcaattagaaagtgaactgctagattttgagaaaaatctttaagaatgagctaataaaaatagctctataaggggctgagcac

SEQ ID NO: 95280 - DNA, 90256 bp, Homo sapiens
gggtgcagtgtaatcccagcaatttgggaggctgaggatggcagatcacttgaggccaagagtttgagaccagcttggccaacatggcgaaaccccatctctaccaaaaatacagaaaaattagctggatgtggtggcacacgcctgtactcccagctacttgggaggctgagggatgagaagtgcttgaacctgggaggtggaggttgcagcgagctgagattgtgcctctgcacttcagcctgggtgacagagggagactgtatcaaaaagaaaaaaaattaaaaaattgcttctttcaccatcacctccccaaacatctcgtctgtcattactgattttacctcctaaatatatctgaaacttgttctctattctcagatcttattccactgccttagttcaggccatcatcttttattttctctcatatggactgttgtaataacatcttaactggtttccctaatgccagttctgcgcactccaagtcatctcctatattattgtcgaagtcatccttgtaaaatatgatcctaatcacatctcctgctcctgcctaaaacttttcaccgactttctatcataagataaaatcttgctcctcagcatgatatatagaactcttcctaatttagtctgcctacattccagccttttagtcccttacttccaaaagattttatattctggcaataacgaactggtcagagttttccaagtacacacagcttcatgacttcaggttttagctcatattcttcttttacccccttttttcccccactccttaaatatactttttttgaggggggggacagggtcttgctctgttgccaaggattgaatacaatggcatgatcatagctcactgcaaccttaaactcctcaagtggactcaagtgaccctcctgcctcaatctcccacgtagctgggactacaggcataaaccaccacacccaactaattttttttttttctttgtggagacagggccttgctatgttacctaggctgatctcaaacttctggcctcaagtgatcctcccacctcggtttcccacagtgctaggattacaggtgtaattacaggcatacaggattacaggtatattactgtgcccagccaaatatgccatcttttagccaaagctttcctttaccattctgtctttccttcctcactcaacatggataatcatcttccatcttctgagctatctttgtactttctgcaaagtttattatttttactctcatttcaatttttttttttttttagacagagtctcacatctcactctgtcacccaggctggagtgtagtgatgcgatatcggctcactgcaacctctgcctcctgggctcaagcaattctcctgcctcagcctccagagtagctgggattacaggcatgtgccaccaagcccagctaatttttgtattttttgtagagatggggtttcaccatattagccaggctggtctcaaactcctgacctcaagtgacccacccacctcagccttccaaagtgctgggattacaggtgtgagttactgcaccccggccccaaaatgtttttaatatgaacatatttctattgctacatatatctcactgtgtagcaatttttatttaccttgtgtttttgttttgttttgttttgttttttagacacagtcttgctctgttgcccaggctggagtgcagtggcgcaatctcagctcactgcaacctccacctcctgagttcaagcgattctcctgcctcagcctccccagtagctggaattacaggtgtgtgccaccatgcccgccaggctaatttttctatttttagtagagacaggatttcaccatgttggccaggctggtctccaactcccaacctcaggtgatccacccacctcggcctcccaaagtctgtagccttcttggtcaggcacggtggctcatgcctgtaatcccactactttgagcagttgagggaggagtattgcttgagtccaggagttcaagaccaacctgggcaacacagaccccatacctacagaaaataaaaaattagctaggcatggtgagcatgcctgtagttctagctacttggggggctgaggtgggaagatcgcttgagcccaggagattgagactgcagtgagctataatcgtgccactggactacagcctgctctgtctaaaaaaaaaaaaaaaaaagtttgggcgtggtggttcacacctgtaatcccagcacagaatcccagcactttgggaggctgaggcaggtagaacacctgaggttgggagtttgagaccagcctgggcaacatggtgaaatcccgtctctactaaaaatacaaaaattagctgggcatggtggcacacacctgtaatcccagctactcaggaggcaaaggcaagagaattgcttgaaccagggaggcggaggttgcagtgagcccagatcatgccagtgcactctagcctgggcaacaaaatgagactctatctcaaaaaaaaaaaaaaggcttcttgaggacagggacttcacctttcatctctgtatctcctgtttatgtacacaataataaggagtgaaaatccaatacccattcttgattttaaaaagaatccagggctgggcacggtggctcaggcctgtaatcccagcactttggaggccgaggcgggcagaccacctcaggtcaggagttcgagataagcctagccaacatgatgaaaccccatctctgctaaaaatacaaaaattagctgggcgtggtggcaggtgcctgtaatcccagctactttggaggctgaggcaggagaatcacttgaacccaggtgtcggaggctacagtgagccaatatcatgccgttgcactctagcctgggcaacgagagcgaaactctgtctcaaaaagaaaaaaaaaaaccctgttaacctaagaatatataagaaaccagcggcaaacactattctttttttatttttattttcagggaaagggtcttgttctgtcatccaggctatagtgcggtggcgcgatcatagctcactgtaccttcaaactcctggtctcaggtgatcctcccatctgggcctgccaaagtgctgacattaccagcaagagccattgcagccaacctagcagacactattcttttttttttttttttgagacaaagttttgctcttattgcccaggctggagtgcaatggtgccatctaggctcactgcaacctctgcctcctgggttccagtgattctcctgcctcagactgccaagtagctgggactacaggcatgcaccactactccaggctaattttgtatttttagtaaaatgacgcggtttcaccatattcaccaggctagtctcgaactccggacctcaggtgttctgcctacctcagcctcccaaagtgttgggattacaggtatgagccattacacctggcttacagacactattctttaacatttttttttttgagacggactttttgctcttgttgccccgggctggagtacagtggcatgatctctgctcactgcaacctccagctcccaggttcatgcgattctcctgcctcagcctcctgagtagctgggattacaggcatgcaccaccacgcccagctaattttgtatttttagtagagacagggtttcaccatgttgatcaggctggtctcgaagtcctctacttaggtgatccacccacctcggcctcccaagtgctgggattacgggtgcgagccaccgtgcccggccacagacactattcttgataatgcaacattagcggcattcccactaaagtcaggaacaaagcaaatactctcttattcgacactattattgctcccatttaacatcattctggaagttctagccaatgaaagagataagatataggtcatgtaaattttggataggaagaaaatgatatttacctagaaaatccaacataactaaaaaatgattggaactagtaaaagcatccaacaagatggtaactctaagacctaagactttctgctataagtcccactatcctgaaagtaggcttctttttttttttttttttttttattgagatgaagttttgctcctgttacccaggctggagtgcaatggcgtgatgtcagctcaccgaaacctctgcctcccaggttcaagcgattctctggcgtcagcctcccgagtagctgggattacaggcatgcaccaccacacccagctatttttttgtatttttactagagatggggtttctccatgttggcttggctggtctcaaactctcgaccttaggtgatccgcccgcctcagcttcccaaagtgctgggattacaggcatgagccaccgcgcctggcctcaagtctcatgggagatgtaatctaaggggccctccctaatgaaaacaaggatgtcttggggaggttaagaaaaagtgtaggcgaggatgtggttgagatggttcttggaatccatcccgggtccccgtactttaacaccagcccttgaaatatgggtgcagctcacacacacgaatgtgtgtatacaccttggagtatctctggagctcatgcatgcacgtccgtcacaaaggatttgaaagggagaatcagatgagacgctgaaaaaaacacctgtggactccatgattgggggcggcatcggagggtttttttgttttgttttttagatcaggtctctccctgtgtcggccaggctggagggtagtggctactcacaggcaagtccacggcgaggccactacagcctcatcttcctgggctcaggcgatcctgcctcagccttcttaatagctgagactacaggagcgcgccactgcgcctatctgcagtgattttttgtttgttttgaaacggggtctcagtctgtcgcccaggctggagtgcagtgccgcgatctcggctcaccgcaacctcctcctcccgggttcaagcgattctcctgcctcagctccccaagtagctaggattaaaggtgcgcgctaccattcccggctaatttttgtacttttagtagagacccccgtctctacagtttcaccatgttggtgaagctggtctccaactcctgacctcgagatccgctcgcctccggcctcccaaagtgctgggattacaggcctgagccaccgcgcccggcctctgctgtgattttttttttttttcttttcgagaaggagtctcactctgtcgcccaggctggatgcagtagcacgatctcggctcactgcaacctccacctcccaggttcaagcgattctcctgcctcagcctcccaagtagctgggattacaggggcccaccaccatgccaggctaatttttgtatttttagtagagatggggtttcaccatgctggccagactggtctcgaactcctgacctcaggtgatccgcccgcctacaccttctaaagtgctgagattacaggcgtgagccaccacgcccggcctgcagtgatttttaaagagtcttttatatttcctttaaccattattttcaacacgcaaataactcttgaaaatacgttcttgttttggaaaaaaaaaaacgggggggaatgtataaaataaacaacgagaaaaacttctcccattcccaacgtaatcatggctatcgtgtgtatgcttccaggacttttctttttacataaagacagtgcatgcttttgtttcgtgcttcacataaacgcctatcccatcttaaagatggttttacaacctgctgttttacgacctgctgacttgacgaagtgtcgtaaagtcccgtccacttcagcgtctttcccaccgcagcacgaaaggccacgcaggccgttctaaccctggcggccaagaggaggggtagcaggctctggaacctgcgggcggggacgaagacggcgcgcgacgatgtcgcaccgcggcgtgcgcggtgtcggcagtagctgcggcgcaggggcggagcgaaggctgcggcggcgtcgggtacgcgcacacgttgcatcttcttcctttcgcggggtcctccgtagttctggcacgagccaggcgtactgacaggtggaccagcggactggtggagatggcgacgctctctctgaccgtgaattcaggagaccctccgctaggtaaggggccgagaccaatgacctgtgtgggttgcatcagccagggagggtgcagggcgtggaaggtcgctgcgccccggctttgcgcagtggtggtcaccatctgggatgttggacctgcccctcgccccagaattgtacgtggaggaggctccgcacccctcgccccgtgtccccggcaggtgcatctgctcctgaagatggttttcccgggcatggagggaggcgcagtgtgagcccgggctagacaacacgagactccrcttcggatctttttctcagagggatgaactcccagtcaactcacctctccctttttcccccggagagcgagagttgctcgtggaaataagattttaaaacttaaaatccaatagtcgtcgcttctcttttagcatttttcccccaactccttttcttacctcctttcctgtcctgtccctcctctcaggagaaatcctcagttcacttgagtcaaattttccttacgttttatcgagttcagaagaaataacccagacgagcatattagcatttaggatttcaactgaggctgcatttatttttaattaaatgtggtagggtaattggggaaaacacccaggtacactgtagactgatgcggttgcttttactgcaccctgtggatgtgtagtaaatttcagagtaaacattggatctgtcaccttactgacacatcttaagttctgtttggaattattttttcgacatgaccaagattattgttggtagattgcttagaatttctgctttttcattactttgggaaattacacagaagaatttaagtagtttgccgatttttttttttcttttgagagtcagggtcttgctctatcgtccaggctggagtgcagtggcgctttcaaggctcactgcagcatcgaacttccgggctcagatgatcctcccacctcagcctccttagtagctgggactacaggcgcgtgccaccatgcctggctaattttgtgtttgtgtcttttttggaaagatggcgtttcactgtgttgcccaggcaggtctcaaactcctgggctcaagccatcctgacttggcctcccaaagtactaggattacaggcgtgagccacagtacccagcctgacctaatatttgttaatgcatatgtatgataatacacacacagtactttctaatgttgaagaagcccatacctttatatacagttgaccacgtggggctgatgaaattattcattatattctcaactttggtgatgttttaaggttgttgaacaaaaacacaacttaatagccattttaaacatttaaaagatggtaatgttttggcatattggttgcagtaatggactaaccgcacaacaaatcaatgaactctaaaaggaatgggtttgattcctgagctggaaaggcattagagtgccttcatgattgagagcaaagacatttggtttctgcagacctgagtccaatcctggctgccacttactagttgtgaaaccttgacaagttccttatttagcttctcccatagtttccttgttttaagaaagggagaataatgtcttccagataggattggttgccagagttaagtgagactatagttaaagctcctgatactgttwttttttttttttttttttttttttttggagaccgagctcattgcaacctctgcctcccaggatcaagcaattyttgttctcagccacacgagtagttgcgcttagaggtgcgcaccaccatgcccgcctaatttttgtattttttagtagacacagcattttgccatgttggccaggctggtctcaaactcctgacctcaagcagtccgcccgccttggcctcccaaagtgccaggaccacaggtgtgagccaccatgcccagcctcctgatacattttttgttacttagaaaatcaccctgaaggtggcctgtttctgtagtgtattacagaactcagaattctgccagtattctgtgaaactcttgtcattttgaactgtatgccagttatcaaatatatcatttttctaattgctcctctccctttttaatttttgatttaattattcccagtttaattcaattacattttatctttaagtaatataattagatgaaacattttaaaataatagttgcattgctagaattttcctattttgtatgcattcatcatgttatatatttaatgttaatttcaaacttaaaayaaagacctttttcccccataccacccaagagcatactgtagatatgaggcttcagtatctcagcataactccagtgtacatccccaacaaacttggaaactccaggtgatctcacacaagcacccaaatcaggaaatacacttggatacaatgcttccatctaatgcacagaccccatccttgttctatcattatttgttacaaccagaccctccatagtgttgagatcaaaatcccgtattatgctttgtttgcatctgattgtcacctctctccagtttctttcagtctggaatggtttcctagtcttcccttggctttcatagctttgacctttctgaagataacaggccacttaacttgaagaatatcctctgtttaagttgtctgatatttcctggtgtctagattcaggctctttgtttttggcaggaatagcgtagttattccttgttcttcattgcagcccatcagttggtgcatgaatttaattttcccattactgatkattctaaccttaattttaatgggcagatgcattggaatcatgtaaatgttccactttgcatcagatcttcacccactagtttcagtatccattgatacttcctgcctaacttgatttttatgattttatgatgtttgcgagatagtgactttcccattctaccattccttctgtatgtattagttggcatttttctgtgaggagagctttctctttttcccatttaaaaaaatcatagcaaaaatactcaagaagttacaatttgtattattttcattttctatttaaaattattttgtttttaaaaattagttttattgaattataacttgtatacaattaagttcaccaattttaagtgattgacaaatgtgtacaatgtgacaaatgtgacaagtgtgtaatctacaccacagtcatcatgtagagtatttccattacttcagaaagtcctctcacgcccctttgcagtcattcctttccctactcctagcacctaatagcgactcatcttctttttgtcacttttttgctttttctataatttcatatacattgaatcatattatatatattcttatattctcatatgtgcctaggataatacttctgaaattcatatatctttttgtctatgacagtagtttacttttgttgttgttgatgttgttttttgtttgtttgttttttgagatggagtctcaccctgtcaccaggctggagtgcagtggtgcgatcttggctcactgaaacctctgcctcccagtttcatgtgatcctcctgcctcagcctcccgagtagctgggactataggcgcatgccaccacgcccagctaattttttgtatttttagtagagacggagtttcaccatgttgtccaggatggtctcgatctcttgacctcatgatccgcccccctcagcctcccaaagtgctgggattacaggcatgagccaccacgcccggccagtagttcatttttttatttgctggataaaatttcattgtatgggtgtgctaaaattgatctcatttatttcgatgtcattaccctgatttgccagtggaagcccctccaacctggactctgtcctttctttcttttttctttttttttttttgggagatggggtttcattcttgttgctcaggctggactgcagtggtacgatcttggctcactgcaaacctccacctcccaggttcgagcaattctcctgcctcagcctcccaagtagctgggactacaggcacatgccaccacgcctggctaattttttgtattttagcagagatggggtttcmccatgttgtccaggctggtctcgaactcctgagctcaggcaatccgcctgcctcagtctcccaaagtactaggattacaggtatgagccattgcaygtggcctttttttttttttttttttggggacggagtcttgctctgccacctaggctggagtgcagtggcgtgatctcggctcactgcaacctctgcctcctaggttcaagtggtcctcctgcctcagcctcccaagtagctgggactgcaggcctgtgctgccacgcccagctaatttttagtatttttagtagagactctatgtcctttcgacatatatgttctctatctttgagtactcctttgctttctaacacaataagatttttcaggtttattttgcaccttccttgccacagccctgtttccagtggaacatggtgtttataaaccagtatctgggtgctagttgtccatcttttttttcagacagaatttcactcttgttgcccaggctggagtgcaatagtgcaatcttggcttgccacaatctccgcctcccaggttcaagtgattctcctgcctcagcctcctgagtagctgggattacaggcatgtgccaccacacctggctaattttgtatttttagtggagatggggtttctccatgttggtcaggctggtctcgaactcccgacctcaggtgatccacccacctcagcctcccaaagtgctgggattataggcgtgaaccactgcgcctggcctgtctatcttaatcaaattaagggacagaggattaatgaatcaattaagtgtcaagaggccattttacactgttttagagtttgagctgtggactacatgaggcttgcattcagatcctgactgctatatattttgtcaaggacattaggctggttatttaactcctttaagcgttactttcctattctgtaaawtggggatgaaagtatctctcatttttttttttttgagacagtttcgctgtgtcattcaggcaggaacgcagtggtgcaatcakggctcactgcggccatgacttcccaggctcaagcagtcctgccacctcagccccctgggtagctgggaccacaggtgtgtaccactatgcctagctaatttttgtatttttttgtagagacggggtctcactatgttgcccaggctggtcttgaacttgtgggttcaagcagtcctcccacctcagcctcccaaagtgctgggattataggcttgagatatcatgtcctttgaatctaactctacaggttaccccaaagatgaaaaattctaactgtaaagcatttggcatagtgactaagatataatagtcactcaaatactattaacgatagcttttttctttttttttttttagttttttaaaaatccaaggtcaacatattaacaaaagcttttatataaggcactatactattttttttttttttaagacgcagttttgctcttgtcacctaggctggagtgcaatggctcaatctcggctcaccacaacctccacctcccaggttcaagcgattctcctgcctcagcctcccgagtagctggggttacaggcatgcgccaccatgaccggctaattttgtatttttagtagagacggggtttctccatgtcggtcaggctggtcttgaactcctgtcctcaggtgatccgcctgccttggcctcccaaagtgctgggattataggcatgagccaccatgcctggctggcactatactaatttctttttgtctccgaagggagaagcagattaatttcagtgtctctaactgaaagctgaacaaattcaaaaccagttggatatgctagtgaatggattctggattctgatttgttgctgctctgagacaaaagactacattttctgtctacagactactgagaaaaaagttcactccttgtaggacttaatattggtttgttgactcatcctgattgctttatgattcaagttataaatactgcattgcttttaaagataaaaaatcttttcatattatttataggagctttgctggcagtagaacacgtgaaagacgatgtcagcatttccgttgaagaagggaaagagaatattcttcatgtttctgagtaagtgttttcatctttttattttcagtactgattggctttttcttttttttagagtttttttagagacagagtctccctcttttgcccaggctggcatgatcatagctcactgtacctagaactcgtggactcaggatcctgccatcccagcctcccgagtagctaggactgcaggcacatgcctccacacctggctaattaaaaaatgttttttgtagagatggggtatcactgtgttgcccagcccagtttcgaacccctggcctcaagccatcctccggcctcagcatcccaaagcactagggttaaagacgtgagccaccacgtttggcctctgaatggcatttaaagaaatattcggcatcgccgggcgcggtggctcacacctgtaatcccggcactttgggaggctgaggcaggcggatcatgaggtcaggagatcgagaccatcctgggtaacacagtgaaaccctgtctctactaaaaatacaaaaaattatccaggtgttgtggcacatgcttgtaatcccagctacctgggaggctgaggcaggagaattgcttgaaccygggaggcggaggttgcagtaaaccgagaacgcgccactgcactccagcctgggtgacagagttagactctgtctcaaaaaaaaaaaaaaatcagcattaaatgttgtatgcttgttttacttactaattaagtagattgtccctagaaagaagtatacttttctttattctaaaagaattgaatctagagacttaaatttttcagcaaactgattccccatgtagtctgtttaaaaggaactagaggtctagctttgagagcccatctgcaacaccagctcctgaaatgaggcagggttatttaattggactggcctactcccagaaatgagtgactggtttaatgggatcccttggcacccagctgttgattttttcctgtacaaccaccaactcagcttttaactgaaacttctagggaagtttcagacaggggaatgttgcttcagaaagcaataccccaaagactggcgctttgacatgctgagaggccttagaagctacctcagaatcagggtacctgtaaccttgtttcctttcacaacccaacatgcccacttcccccatcatatagagagggactttctagaatttcctcatctggccaagaaagcatctttccaaaagaaatgcagttgacttaagtcccctccttgtggatctcatcaaataatctggaaaggtcagtcaatcccagctcagacagacttcacctgctcttctgagggcagcttcaagatattacctaggtgactttacacgtgtaataagacagtctttgttcctgtgccgctctgtttcttatcttcctttaatgttgctccctcacctccctgcgcccacttcctggtccatttattctgatgatttactttgctcaaaagaattatctgcattccctatctttctgctcccctatgaaacagggtatgtggccaggcgcagtggctcaagcctgtaatcctagcactttgggaggccgggcgagtggattgcttgagctcagcagtttgagaccagcctgggcaacatagtaaaatcctgtctctacaaaaaaaagaggaaaaattagctgggtgtactcccagctacttgggaggctgaggcaggatgatcacctgagcccacgagacggaggttgcagtagagccaggatcgcaccactgcactccagcatggatgacagagggagaccctgtctcaaaaaaaaaaaaaaaaaaaaaaaagataaactgagctgggtgtggtggcttaggcctttaatcccagcactttgggaggccaaggcagacagatcacctgaggtcaggagttcgagaccagcctgaccaacatggagaaaccccatctctactaaaaatacaaaacttgccgggcatggttgtgcatgcctgtaatcccagctactcaggaggctgaggcaggagaatcgcttgaacccgggaggtggaggttgcagtgagctgagattgtgccattgcactctagcctgggcaacaatagtgaaactccatctcaaaaaaaaaaaaaaaaaagataaagctgaaacactttcccctgttgccactacatacacacagtcaccccatactcataaacttctgctctctatctccccctttctcccagtgtagttgtaccataattgtcatttgattaccattctgtatttacattataatgaccgtgtaagttttatttactactgagccacatagtataattgcttttcatgtaaaactgttagttttccatggagtaattggtgtttgtttgctttgtaattttcttctgaaactttctgatttctgaacttttctatgtgacttcaggaagtttggaggaatcttcccttaggagtcagtattctcaaattttacaataatatgctttagtttgggtctatttttcatctgttctgctgggcatttggttgcctctttcattgtggaaacttggaaatcctgcttttggaaattgaaaacattttttctttgaaaaatgtttttctctctatttttggttctttatgtggatgttgggattagtcctttatttttctaagttgtcacctccattttccatctttctattttttttttttttttttttggagatggagtcttgctgtgttgcccaggctggagtacagtggcacaatccaggctcactgcaacctccgcctcccaggtttaagcgattctcctgcctcagcctcctaagtagctgggattacaggcatgtgccaccatgcctggctaatttttgtatttttagtagagatgggatttcactatgttgtccaggctggtctggaactcctgacctcaggtgatccgcccacctcggcctcccaaagtgctgggatcacaggcgtgagccaccacgcctggcctctttatttttatttttagagatggaggtctcagtatgctgtccaggctggagtgcaatggatagtcacaggtgcaattatagcacactacagcatccaactcctgggcttagcgatacacctgcttcagccccctgagtagctgggactacaggtgtgtaccaacatgcctggcccattttttttttttcctttactttctggaaagttcctcaacttctcaactttattatcccatttttctattgaggtttttaattttggctattatgtttttagtatctgagtgttctgttttttttacattctggatactctttttttagtatcttgttttatgattgcagtatttttgtttcattgctaaaaatgaatttattcttttatgaacttttattttaggttcagtggtacatgtgcaggtttgttatgtagataaacttgtgtcatggggtttgytgtacatattattttgtcacccaggtactaagccatccaatagttatttcttctgctcttctccctcctcccaacatccaccctcaagccccagtgtctgttgttcccttttttgtgttcatgtgttctcrtcgttaagctcccacttataagtgagagaatgcagtatttggttttctgttcctgtgtcagtttgctaaatataatggcctccagtgccrtccatgttsctgcaaaagacatgatctttttttttttttatggctgcatagtattctgtggtatatatgtaccacattttctttatccagtgtgtcactcatgggcatttaggtkgattccatgtctttgttattgtgaatagcgctgcagtgaacatttccatgcatgtgtctttatggtagaatgaactatattcctctgagtgtatagccagtaatgggattgctgggttgaatcgtagttctgtttttagctctttgagaaaatgccatactgctttttacagtggtttgactaatttacactcccaccaacagtgtgtggttttttgttttttgttgtgaggtggagtcttgctccgctgcccaggctggagtgcagtggcacgatcttggctcactgcaacctccacttcccgggttcaagcagttctcctgcctcagcctcctgagtagctgggattataagtgcccaccaccacacccggctaatttttatatttgtagaagagacggggtttcaccatgttggccaggctggtctcaagctcctgacctcaagtgatctgtccrcctcggcctcccgaagtgccgggattacaggcatgagccaccacacctggcttgtgatgggtttggatgaggtttgatctgccttcgtagcctctttattagcaatagattcttggctcctttgccttgatttattttatttatttattttttttgagacagggtctctctctgtcacccaagctgaagtacagtggtgtgatctcagctcactgtgagttcaagcgattcttgtgcctcagccttctgagtagctgggagcacaggtgcatgccactatgcctagctaatttttgtgtttttagtagagacggggttttaccatattagccaggctggtctcaaactcctgacctcaagtgatctgcccgtcttggcctcccaaagtactgggattacaggtgtgagtcaccacacttggccagccttgatttatattaaatcactgttattctcaacatcccagttatattttcatatttgcacctctgaatagacatgtaaagaacaaattagcagactgggcgtggtggctcatgcctctaatcccagcactttgggaggctgaggcaggtggatcacctgaggtcaggaactcgagaccagcctggccaacattgtgaaaccccgtctctactaaaaatacaaaaaattagcctgtcgtggtggcagccacctataatcacagctacttgggaggctgaggcaggagaattgcttgaaccctggaggcagaggttgcagtgaaccaagatcacaccattgcactccagcttgggcaacaagagtgaaactgcatctgaaacaaacaaacaattarcagatctattttttactatagtagaaaatacatggtaaatataataaagtttccatttttacatttcttcataagtctcatgacttactgatttgctagagcagcagtaatattttatctcgtgcttatattctagaaatgtgatattcacagatgtgaattctatacttcgctacttggctagagttgcaactacagctgggttatatggctctaatctgatggaacwtactgaggtaarcaatgaacattttgttgtgtgtgttttgtcttatgcttctgtttttttatgggaacctcatcatttattgttggcttatgaactattctacttaagkatattaacagagtgttaattatatagaccaaggtacagaatgctcatcttgtttttttgtcacaaaaaaattctttttttgtaattcctaagtttgaacctttartcccctaccagctgtacttttgggagcatttagtgccatcttggccttcacagattcctagcatttcatagccagatggggctgtatagatcatctcatccaactttcttactttacggataaggcagcaggcctagaaaagttaagtttgaacagggtaacacgcatagtttggatcccattttcttttctttctaagtgtatgccttgtttaattaattatttcagtagtaaattarctttatatacaatcatgtgcctcttaacaatgggatgcgttctgagaaatgtgttattaggcagtttcatcattctgtcaacatcatagagtgtacctacaaaaacctaaaggggatagcctactacccacctaggctatacagtgtagcctattccttctagactacaaacctatactggcaagttacaatactcaatacagtaggtaattgtaacacaatacgtatttgtgtatctaaacatagacaacatagataaaactataatcttatgggaccattgtcatatatgcagtctgtcattgaccgaaatgtcattatgcagtagatgacagtactgctttttagatgctgctttttttcctgtttgtattctgctctaaccttcctaaatctcataaaattcaaagtacacagaatggtttytaagtactaacttttaaatttttcaagtaaatgaatctgtttggctaggtaccatcccttcggttcattcaggttggcttatttctgccaccaattctcaaattcttattttcctgttctttcctgaagtgccccgccacactcctgtaaaaaaaaaaaaaaagcagaaagcatagcaaaataaatgtggcattwatttaagttctattttagattttaggcaatcagaatttagtccacataatgataaattgtataatttgagaaaggaaaagcatagtaagagtgtactgttgctctagttaactagaatttttttatggtctttctttttataagttgaaatgttggaatgcatttcttttctrtcttttatgttgacagattgatcactggttggagttcagtgctacaaaattatcttcatgtgattcctttacttctacaattaatgaactcaatcattgcctgtctctgagaacatacttagttggaaactccttgagtttagcagatttatgtgtttgggccaccctaaaaggtatcaataattcttaataatcctctgttttaatcgtttaatattttgctggataaaaattatatatatttctgtgtgtatgcatgtatgtatatgtgtgtgtatatatatgtttagacagtaacttaggactttattacaggggaatgacctscctggctgttttattcctatccagctacgggaattccctgtgtttttctgccgtcgtctgtctcacaaccccaacttccttcttgcctttggagctgatcttattcctgataaagaagtccccatcccatttatgttagcacctctcctacttcagctattattttactccagacacttgtctctgacttgaaaaaagccattattgctcagtgagtgtgtgactgggaggttagggagtagtgggatgatgtggagttgtggtttttcttggaggtcacttccttcttctacaactagtttggaacaagtaagaatatgctttttccaacttggaaagacagttttttcaaaaacaactttcttgaggtataattgacatacagaaaatcacacttatttaaaaatgtatattttgataaattttgacatatatatgtgtgtgtatatatacatacacacacacacacagctgtggaactatggttacaatcaagataataaatatatccaccacccccaaaagttcctcatgctgctttgtaatcatccaccctcaccaggtcccaagaaaccagcatgcccagctttgcatatttttcgtcttcagttggttgtatctacggttatggaacccatggacacagagagctaactgttttagaaaacagttcagtgtatatccagatatttaacatttcatttkctttagaagcacaactttaagccatctcaattacttyaattagtcacaactggaactttgcttttgaagctgcagatttattgaatagtttaaaattatctttgctcataggaaatgctgcctggcaagaayagttgaaacagaagaaagctccagttcatgtaaaacgttggtttggctttcttgaagcccagcaggccttccagtcagtaggtaccaagtgggatgtttcaacaaccaaagctcgagtggtaagcctttttttctttttttttaaaaaaaaaaacactttgggaggctgaggcgggcggatcacaaggtcaggagattgagaccatcctgaataacacggtgaaaccgcatctctgctaaaaatatacaaaaaaaaaaaaaattagccgggcgtgatggtgggcgcctgtagtcccagctactcgggaggctgaggcaggagaatggtgtgaacctgggaggcggagcttgcagtgagccgagatcgcgccactgcactcctgcctgggcaacagagcgagactctatctcaaaaaaaaaaagatgacatttcagtctgtctgaggccctaggtctgaaaagacaattattcctactcataaagtttattttcttttaataaatttaaaaggatcttcttgcaagaatctgacatttttaagtcttggtttcacatttaattgttcatctatataaagccctaatctttataattatatagctaaatattttgatcatccagtgtatgtcccttaggcaatccaaactccatataaataaaacctcattaattttacacctttgcaattttttctttcttctgaatctcctggtttttgaaccattgagcatcaagtcctgggattctgcagcactttttcattggttctgtaggaaaatgtgacatagtgtacagtacaaaagctccttttctctaccagagttrctccactttgatctgttttacactttaggaatgtgttgtaaagttttgatttaattaaggttttctaatgtaaaatttgaaaactactgtctacttggataaagatagcccagtccactcagttgttttggctacaaatctttactcatccttcactgtttttcacatttactcaacgagtcctgttatgacttctcatgtgtgtagatttgttttctgtccatcttcagtgctactgcactttgttgaggcctaatttttccttgcttggtttaataccataatctcataactaaacttccttttgtctcatctttctctagttcagggtatcactttagaaaacacaaatccacggtcctattatccctgaggactgactcctcattgcctaaaacttaaaagccaaacttaaaaggtcctctgtgtttttgacttaatctatttcggcttccttccctacccacccaatatgcattcctaacttttcatggacattgcactactttttcctgcctttgtgccttacctactctgttatttatttacttagaatgaataccccatatactttttttttttttttgagacagagttttgctcgtcacccaggctggagtgcagtggcatgatctcggctcactgcagcctccgtctcccaggttcaagcgattctcctgcctcagcttcctgagtagctgggactacaggtgcacgccgccaggcccagctaatttttgcatttttagtagagatggggtttcaccatgttagccagtctggtctcaaacttctgacctcaagtgawctgccatcctcggcctcccaaagtgctgggattacaggcatgaaccaccgtgcctagcatcccatatactccatctgatacatttctacttatcttcgaggtccagcttggttcttaactscttttaagcttttcctgataaacctaggtattgctgattaatttcaactgagtgccctaacarcaccctgaacatayctgtattactggtatttggttttatttatattcttaaccagattttgtaccctcaagtgtagggatgatgttctagtcatcatatttttcataaccagtgtgtgtagtgcctggcacatttgttgaatgagtgtgttcttagacatttaaccataagactttttgttgtgatggtggttgtgtttttcaggcacctgagaaaaagcaagatgttgggaaatttgttgagcttccaggtgcggagatgggaaaggttaccgtcagatttcctccagaggccagtgggtaagaaaatgtaactcacatttataattgaatatatttagtgggaaagctttaaaacagtgattaaatacttaaagtattaataggttaataatatagaagaacataagattttaattgtgagagttaaarttctaaacgttttaacagtttttatgttattaatagttaatgttgatttaatttgtagttttagtttgtcaacttagtaaaagagacattttagttttatcctgacagaactttaattatgtaattaacaaaatatccaaaaataaraaaccttaaatttcatttttatttttagatttttgggctttcatttaattggatttgtatttgtaccctgagcaatccttttaattagcagttgaagttataatagtattggtctttaarttattttttttccccaartgaaggggagtcctgaaaagcctgttcctattcctttctttccattaggtttcccaaccccttcatctcttggcacccatggaaagtagtatttgaatagctcattagagaaaaagactgttctgtatggtgatcaccaggctggggctgcttcagcccttgcccaccattccccaaggctgagaaggaagtctttgtctttgcacacctgtcatcctatttgaagtatactggacaagctttataatagcgtccttccaatgatgttaatataataaaatacctcttattaaagcagttagcctcacttagaaaattaaccattaggaaaatgttctgccatgttttgtaattgaggtgattattttttccaaatttaagatttccaaatttaattttttcagattttgtattctatcaccataatgaagttctcacctttctatagtacacagtagaaactggaagatacagaaacaattttcttttagckatgtatttaatasttcttcacaaactatttcataagcatcattaacagtaaaattgcttttagaatttcacattttgtctctgcttttctatgtttgctgattcaggaggtgaaataaagggtagatagaaggagatgaaacagaagtgatgactgtggaaaattcacagacttgatcgttaaatggttgattggtaattgactaagtggattcaggcataaatartacttaccttacatggtttaatatctatagacatcttgggttcctaccatctagtattctgctactgtgcacttggtatgagaggtcatgattgtcctgttggatagtgaccttgatcgtctaaaagccacctttttttggcagtggccatttttagctgcrccacttgaacatttgtcttttttaaatcttttcatattttgcgtcactgtcacttctgggaatagtgagttccccatgtttgtatatttacagtataatatatatttacctgttgtaaattatgtcagagactacgctcatgagacagttttggggtyaggaatataaatcagtatttagttttttttactatgcatagttttcatcatctcttcttrtactgttaaagagtttttctttaattactattttttcattttttcttttctgtgtcttaaaggccagaaggcttggcttagtcttttattcttattcttagctaacatatacatagcacctattatgtacaggtgctaccacatgctttacttatagtaacttattaatcccaacagccttctgaggaggcactgttgttatctctgttttacaaatggtttcggaaacagattcatatgttgtagtaacttgccaagctcaaacctctaccatctggctctagaatccatataattaaaaattgtactacatgtatctgttaacatrtggcagaagyccaattcagcatcagttctaactcatgcagcatgattcttttgtgtgtgtgtgtgtgcgcgtgtgtgtgtgttttagcgattctgatatagagtcactctttaactgatgattttagttgtcttgtgacttatagtcctcttagctttcttgaggtttggaattgttagacctgcagatttagaaataacatttttgaaataatgttttgatctcatcacctttcttaaattaatttctgtattttaaagccaagcacattaactgtaaaataataggtactaattgttaatcttttcttgacaatggttataacatgttattgggtgcaacgccctcaagttaaaagtacaccacartatttttcttcctgggaacttatggcccttcatttagttttatttttaataaatttttaattttagaatagttttagatttacacaaagttgcaaaaatagtacagaaagtttccatgtaccctgcacccagtttttcctaacattaacattttacattattatggtacatttgtcacaactaatgaactaatattaatatgttattaaactccatccttttttgggattttgttagtttttccctagtatctcttttctgatctaagatttcatctgggatatcacatacagccctttttttaaaaaatttttaattaattaattaattaattttttgtatttttagtagagacagagttccgccatgttggtcagcctggtcttgaactcgcgacctcaggtgatccgcctgccttggcctcccrtagtgtcgggattacaggcrtgagccactgcacccggcgtacagccctttattatatgtataaagttttgaatagccctaaatatgttgcattgtagttgtttgcattagtctttgtatataaaccctccttttttttttttttttttttttttgacatagcctcgcactgttgtccaggctggagtgcagtggtgcgatcttggctcactgcaacctccatctcccaggttcaagcaattctcctgcctcatcctcccgagtagttgggattacaggcgcccaccaccacgcccagataatttttttttttttgagatggagtcttgctctgtcgcccgggctggagtgcagtggcacgatcttggctcactgcaagctccacctcccgggttcacgccattctcctgcctcagcctcccaggtagctgggactacaggtgcctgccaccactctcggctaatttttttgtattttttttagtagagacggggtttcactgtgttagccaggatggtcttgatctcctgacctcgtgatccacctgcctcgacctcccaaagtgatgggattacagacgtgagccaccgtgcccggccaatttttgtatttttagtagagacggggtttcaccatgttggccaggctggtgttgaattcctgacctcgtgatctgcccgcctccgcctcccaaagtgctgggattacaggcatgagccaccgtgcccggcccaagcccttcttaaagttgaatcattgatctgggatgctaatgacttttaaaaacttgattgatttgaaaataatgtaaattcataaacttttatgaatttttatattattttattttataaaataatataatttcataaacttttccccctcccatatggatatcaactgagatcaaacctgtgtgggaaaccaggtaactatcttaaaactgtacaactgctggccgaggcaggcgggtcacaaggtcaggagatcgagaccatcctggctaacacagtgaaaccccgtctctactaaaaatacaaaaaattagccgggcatggtggcrggcacctgtagtatcagctacttgggaggctgaggtaggagaatggtgtgaacctgagaggcagaacttgcagtgagctgagatcacgccactgcactccagcctgggcgacagagcgagagtccgtctcaaaaaaaaaacaaacaaaacaacaacaacaaaaaaaacygtaccactgctgccatcattataatttgaaactaatacaagttggtgaaagctgattaaacttccttgcttcatgccttgtcagcccaatcaactgtatttcaacatagtggtgtaacatattttcttttactcatgtacttgatagaaggagggtgttgatgtgtgatattatcaacagtgtctctgatctgtattcttccttacaattgtcagctgctcacaggaacagcagaacagtgtttttgtagattctgattcattgagtgttggtgctgatgagacctttgggattatttagttaaaattcttttatttttaatctccgtgacatgagtttacctatataacaaaacttcacatgtacccctgaacctaaaatagaagttaaaaaattaaagttaaaaaataatcttttggctgggtgcggtggctcacgcctgtaatcccagcactttgggaggccaaggcaggcggatcacaaggtcaagagatcgagaccatcctggccaacatggtgaaacctcgtttctactaaaaatacaaaaattagctgggcatggtggcgcgtgcctgtagtcccagctatttggggggctgaggcaggagaatcgcttgaacccaggaggtggaggttgcagtgagctgagaacgtgccactgcactccagcctgggcgacagagcgagattccgtctcaaaaaaaaaaaaaaaatcttttattttggcatctgagaaaaccaaagcctagagaagtaaagcggcttttactaattgtcatgtgctcttttcatttagtcatcacagtgacagtctcagaagagcttctctccagtggcataggtgggcacccagttctcagtagtagtaggtcttattaaagacaaacagtggaaggtagcgttggaaacaattttgaagcagctttactttaattaaatgatcattctttttgataaaaagaaaaaggagartctccttaaggttgcaatgtttgtaaataccttgtcccctctgtgagattttacatttgaagttgtttcttataattgttttatatatggtatagtctttttttttttcctgtcagggtcagattttctatcacagtactttttgttagaaaataaaatatgacttgggtaccaattagaaggacttttgtttagttctcatctcctcaaaaaggttaagtttaagtatttagttaaaacatgttaatgagtttctttgtgaaatgtttttgttttagttacttacacattgggcatgcaaaagctgctcttctgaaccagcactaccaggttaactttaaagggaaactgatcatgagatttgatgacacaaatcctgaaaaagaaaaggaagattttgagaaggtaattaaaagtgtagtgatgaccctttgccagaaaagtgaattaaagttacaggattacctaataccttcatggtatgaaaataaattttgttctcatagctgcttttttccctatctatatattccatatctgagacctaagccaagaaatgtcgagctcccataccaaaaaacttaagagttatttttcctttccccagttatagagtttacctgaatgatatgttttcctataataccaatttattaaatggtcactggaggcaggttttttggtcatataatcttaagtttatgaatgaaataaacactaagtaggtattggaaaatgtgaaggtttcctarcctcttatctttattcagaagtatggcagtgtattcaaagagagggcaaatgattgtcagttctcccagtaatgaccagcttttccaaagtaaatggaaaactccatcgtgagatcagctttctcagctggaaatttggaggctaatataatgagtatctatctgttttttcttttttgatctaatatcatgtaacttccacaaccattttcaggctaaataagactgatggtctatgttacatttgcttaaatgcagtatcaagggttgaaaatgcacgaaaaaatgcaaaagatatactgatggttattttggtttcttactacaggttatcttggaagatgttgcaatgttgcatatcaaaccagatcaatttacttatacttcggatcattttgaaactataatgaagtatgcagagaagctaattcaagaagggaaggcttatgtggatgatactcctsctgaacagatgaaagcagaacgtgagcagaggatagamtctaaacatagaaaaaaccgtaagccacattgttttatattttaattgatattcttatattgtgcttctttagtagaacrtgatttcttttttgtgaaagctgctagtttttttgtttgtttgtttgttttgagaaggagtctcgctctgttgcctgggctggagtacaatggcrcgatctcggctcactgcaacctccgcctcccaggttcaagtgattcttctgcctcagcctcccaagtagctgggatgacaggcgtgcaccaccacaccttgctaatttttgtatttttagtagagrcggggtttcaccatattggccaagctggtctcgaattcctgaccttgtgatctgcctgccttggcctcccaaagtgccgggattacaggcatgagccaccgtatctggcaaaagctgctagtttaaatacatttgggtatatgactcatttgtcttagaaatcttttttcttcctctatctttatgttcttgttattttattaacatcacaactgcatgtgaatatgcccttagtatctcacttattatgtgtagtcttttgcattgtattcattcaatttgaaggattccttctgcaacattttacagttttcttactttaaatacttagcctttctataatacaatgtttgatgataatgttgtcacccaagtcttccttttggcatgtgggtaaatatgaatataatatatagtacaagctcagtactaacctgtatctctgaaatatcacttgactgaagagcatatctttcttattcatggcttctctcctgaacttctaaattgggtgattttcattctgtaattatgttgtcagaacttcactataattaaacctggagtgccacatttgggaagtattagtaaattaaaatagttataatgagtcttttttattttgaaaaggttttctacattttcagaggtggctaaccaatggacttttagacctatcttgattatttgagggcaagtgtcttacatttctagtagcttccacagaaaattattgtttaacagtttgtatgcatacagggcaggtttttgctagatattgtgatatagagggagccatagccacttggaatgtagagtccttttttctggtattaaactcttttctttcctgtgtcactgttttctatcacctcttattttcttggatccaagagtatcctgcttctcattgggatgatgaaggggctttcagggagcccatgagctcagactctcaacctgagctgtgttctttagataggcacggtctrtagtgccaatgcctgtgggaccttagggccggaccaaaccattctgtcccttaggcatgaggtggcaaaataagaatgcttctgctttaaaggcagaatgttaaatttcagggagatgagaagagaaggggctggcccgttgtgccatgatgggaagggaaacactaggtgagcggagccttcaggccttgtactttttcttatgcttaattgataccacatgagtggaatgtattgatgttaccttttctaaaacgtrtttgtatttgctaaatgtattgtgaaacttctttaattaaaaaatgacgcatttgctcttggtactggatactggaaatattacagtgtttttaaactaacacagggtggttataaaacaagaacatgaaaatttatatcaaattatagcactatgagaataatttgaatttaaccagattagtgaaccgtaatgtaattatcattttatagctattgagaagaatctacaaatgtgggaagaaatgaaaaaagggagccagtttggtcastcctgttgtttgcgagcaaaaattgacatgagtagtaacaatggatgcatgagagatccaaccctttatcgctgcaaaattcaaccacatccaagaactggaaataaatacaagtaagtrtatctccttcaatatgctaggtagccwtctktgcttttgttttgatcttctttaaacatggagtacaagcaaaatagtcaagaaacctggccttttgttcatccatgggttcactggctggtggccttctgtaaaggcatgtagcctttcacgggccgtttactcacctgtcaattaaggttctaccacattatttctaagatcacttccatctatgaaagtcctgagtctgcctagagttgctttttttgtattgattaggtatactgtgatgtacatctttaggtgaagatactttgcttcctgtaataaactttgagtctactttgcacaaattgattcctaaaagtaatagtattgaaaacttccagaaatatgaacaatacaggaragtaacatgtgtttagattagttttcaatgtggatttgtaggttaacgaatctttgttttaaatggaccttttccaaaaaaaaaaccctactttataaaataaatcataaaaaatattttttaatactttgaagaagcgtactacacataaatgctgaattaaaatttctgaagagaatggtaaatgtaaatgattacttggttagctgatgtgacttactttaaactcatgggtgctgacatgtctgtccatatatagacaaatacacatgtgattatatgtgcatacatatcatttttctcaggattactccttgttttactaagcaaatcctttcaatacatttggaaaagtgactttggatacacattttcagtgtcaaataattgcaaagcataatgcagtagcatcttaatcaagttgtatcttaaaagttagaatgtataatggctgggcacagtggctcatgcctgtaatgccaacactttgggagtctgaggcaggaagctctcttgaggctaggagtttgaaaccagcgtgggaaacatagcaagaacctgtctctaccaaaaaataaattaaaaaaaaaaactagccaggtatggtggcacgcttcagtagttctagctgcttggaagactgaggcaagaagattgcttcagtccaggagttcaaggttacagtgagttgtgatcatgccacttcactccagcctgagcaacagagtgaaaccctgtctctagacaaacaaaaaggaaagcattggttgggtgtagtggctcatgcctgtaataccagcactttgggaggccttggtgggtggatcacttgaggccaggagtttgagaccagcctggccaacatagtgaaaccccatctctactttaaaacaaatacaaaaattagcggggcatggtggcgcatgcctgtaatcccatctataccygggaggctgagaatcacttgaacccaggaggcggaggttgcactgagctgagatcgcaccggtgcactctagcctgggtaaaagagcgagactgtctccaaaaaaaaagaaagaaagcataatgcactaatatatatatatatatatatatatatatatwtataaattcaaattgatactgcatgtaaattgtatacattatcttagtcagaaactgttttttagactatttcatcttaaatgtaattttgacctaatgattttctggtcttctgttggtttttttttttacacagtgaatggagcactgtttttgagtgtgtttgagtacttttaagacttttagggatttacttgagtaagggattactcagaacagagtgagactccgtctcaaaaaaaaagatgttcaaaagctaaatttccttaaaattattacatgtattatttattgcttcctacyatgttatacattggccattacagaaatattatgattatacaatttgccaagccaatacctaattttgtattagattgcaaatttgcttttttgtttgactgctaagttgacaactgactcattgttctcaaaggctgataatgttttgatacactktgagtattaagtcataaaaccttttggtttttaagaatctcttaacttgtaaagaattacattttaaattagtattgttgtttataatgcttaatctaagagggaaagggtaaaatgttttgtttattttattttctttttttctagtgtttatccaacatatgattttgcctgccccatagttgacagcatcgaaggtgttacacatgccctgagaacaacagaataccatgacagagatgagcagttttactggattattgaagctttaggcataagaaaaccatatatttgggaatatagtcggctaaatctcaacaacacagtgctatccaaaagaaaactcacatggtttgtcaatgaaggactagtagatggatggtatgtttaatgttacttagaattgacaagaagtarggacatagtagatcagtgatttttaaactgcttgagagatagggaaggtgattgggaggagggggaatgggtaggcctwtagaattcctgattcttatcttcttctcagccagtgcattagggcttccccttcttgttttaatgccacaaataatggagtgcccactggggatcatggaatgaaaaacacacatgagggcacatcctctgcaggtcttagcatttaatagaagaacagttttgactttctggttcttggtatatttggttactgatctctactctctgctgaggctgaggtttttctttttggctaggtcccaagaaggttaaaatacccttgaatckaagtgaagatgtaaaagtttatcttgagctccatgaaaagggtattactgcatacttactgaggtttgcagatccctgcagaatattaatttcctacatatatttttgttttattccaaaggrctttataaagtatattcatatgtgaatgacaggataccatcttttttctgattctcrtggtcctatgtggaatagggaccttgaaaatgtttgataaatamaaatgtatgaatgcatgggatttccatatttgaaaatgtcaccattgtgtcttttttttcaaatgtgcttctactgtttccagtagtgcatttattttactgcagtatttgacaggtcagcagttatcctgttccttgaatttgggctcactagtattgcatactacctaattagtataactagctcttagacaaatgtttaacaagctgaatatgatttattattsattaagtatcttctactctccacatctacacattacaaaatttccttggtacttaaaatttacatatttccagggatgacccaagatttcctacggttcgtggtgtactgagaagagggatgacagttgaaggactgaaacagtttattgctgctcaggtgcgttacagtttcttttccagcttgtctgtttgaaatttcaggtacttctattactgtccctttactctttattatctctgttgttctttctattccttgtttgtgccttatgatccaagggcagatttttttttttttttaaaacaaactttttttttttttttaaagtttatcactgcttataatagtgaaaaattgaaaatgtcctaaactcctaagctagatttggagaaaggcagctgaagtatttttagcagtgaattatatgacttgactgtgagcagtctgtagactgaacctttacagtgaactgttaagggtaaccaaattagtttgtatacactgagttttatatttcactagaagtaaacttgaaagtatttatcgagtttttttttttttttctaaacatgcttagcatgaaataaaggcaaagttctaattaatactgcttgcccttaaaatcatgttgttattgttttttagggctcctcacgttcagtcgtgaacatggagtgggacaaaatctgggcgtttaacaaaaaggtatgtatgttaactctctgccttcttttctcatgcttaagtccyaaataatgtacaagtagaagtcattactgtgctcatggtagagaaaagtttgtgaagaatattaacattttgcagactttcaggaaaatggaatgttttccttttttaaatacacgaagagcattaattaagcctattaactattccaaataagtaacaatgattgaaacaaacaaacttggaattatggggaacagtaatatttttttccttaaattttttatgaacactctgcatttcatttttctgctttcaagctgcgagctctctgtaagaaggtattacttaatgcttttatttgccttaaacatagcttttagcatattacatgttaaaacctgagatgttatatggctttgaagcacaatcacatttatataaaagacttgcttatacaaacgcattgaaaatgcattattcctagtgttaaaaaccatgtcctctggttttcttagtgccaaggggaatattgggataactctattctaccccattcccttgtrtgctgagaggacatagaattctaaaagtatgtatttcattgagttgtattaaagtttcattaattacagttcctttgtcttactgaatccagcttttttttttttaactgtttcttaactgaaagtcaaatgaggaacattgcctattgacattgttaattactaattggaaagcagatgcttggacactataataaggcaaatcattcaaatgccatgttttaaattatggtttctgtgattgtgttctgtaaattcttatttgggattgctgcytgatggtgctgatgtcttgcctcaagatatagttgcttgtttcgcatgtgtcttgaatttgttttattttggtctttcgtgtttagtttttgatacataaaggaattgttaattggttcttkctgttgctgcagttactaataataaatatgagtagaatttgctggcaaagttaacaytggtgtacttttcattaacaatacaatttttactgattttaagttttaataaagttaaacatggacacttcagatatctgaaatatattttactatagtmaaatagttctgtagggtctgttaagatgaacaacacattcctctctctatctactttcatagtctccctggagaaagcactttcatctcttctagatagttcttttggtatttattacttatatttcttttttttgagatagagtcttgctgtcgcccacggtggagtgcaatggcacagtctaggctcactgcaacctctgcctcccgggttcaagcgattctcctgcctcagcctcttgagtagctgggactacaggcatgtgccaccatgcctggctaatttttgtatttttagtagagatggggttttactgtgttcgccaggctggtctcaaacccctgaacttgtgatccgcccacctctgcctcccaaagtgctgtgattacaggcgtgagccactgtgtccggcctrttgcttatattgctgaatgaaatatatgtgttactacttttttagctatgtttagacatattagttgacttcccgtgatggaagataaataatttgaccttttactttttctcctaactttttggtttgcttgtagttgattgtcttgctttgtctctccctctcatttgcttattttttytttttgtttttgtttttctgttaaaaaaaaaaaaaaaagccaggttctcatgcctctactcccagcagttcagaaggccaaggtaggaggatcgcctgagcctgggattttgagaccagcctagacaacatagtgataccccatctctccaaaaaaaaaaaaaaaaaaaaaaaaattagctaggcctggtcgtgcatgcttgtagttctagctacttgggaggctgaggtgggaggatcacttgagcccaggaggtcaaggccgcagtgagtcctgatcacaccactgcaatccagcctgggcgacagggtgagactctgtctcaaaagaaaaaaaaaagaaaattaatttttttttttcctctccccacccctgcgtactctttttttcttttttctttttttttttgtagcggaatctcaccctgttacttaggctggagtgcaatggcacgatctgggctcactgcaacctccacctcccgggttcaaatgattctcctgcctcagcctcccgagtagctgggattacaggcacccaccaccacacccagctaatttttgtatttttagtggagacggggttttgccatgttggccaggctggtctcgaactcccgacctcgtgatccgcccacctcagcctccyggagttctgggattacaggtgtgagccaccaagcccccctgcatacttttctgtctccacaagatgtgcaaatttcccaccaagatattcagatgccttaggtatactttcagtttcattttggagacatttgccagagccttctgtgctgctctgtaacctgatttggattcatggcccattggtttctgaagcatagctatcttcctaggtctcttcagcatcttcctagggattccctttgcttttattctgtaatggacattacagaacattgccccattcttggatcttctttttttttttwtatattaccttcttgctttcctgaaggtaatacgtcattctttggagactcagtccagctccctgacaaggggaggatgggatgaagaaaattttgaaaccttgtatctgacctgtgtttttagtctgaaatttcatgatgataggccatggtgagggtctgttttcatccgcatcattggaagaacatgtgacttccagtctagaaactcattccttcagttctgggaaattttcttgaattctctccctttccctttccctttccatcttttattttctttctcttgtcttttcttttctcttttgttttgttttatttttttctgagacggagtctcactctgtcgcccaggctggaatgcagtggcacgatctcggctcactgcaacctctgctgcctgggttcaagcaattctattgcctcagcctcctgagtagctgggattacaggcttctgccactgcacctggctaagttttgtagctttagtagaggcagggtttcatcatctcggccaagctggtcttgaactcctgacctcttgatccacccgcctcagcctcccaaagtgctgggattacaggtgtgtgccactgtgcccggctttgaattctttttctttcttctctattgtgtatttcttctcctggaactcttcttgggaagatgttgggcctcttggactggtactctcgtttcgtgttctgtcttattttccttcttgtattttagtttatcacagatctacttaatttttatcttcccacctttctgttgaattttatttatgctactatagttccagtgtttctcttgttctctgaattttcaaaataactctctattcttgtttcatggtattaatagtagggttttctgcagagtagtgtctcttctccccaatttgtttattttggtttctttcacgttaaaggtatttctcagatgtctggttagagccttggttatctgcttatgtttaatgtggggaaatagtgattggaagcctgaagaatgagagttgggctttcaactgagcttcactgtacaatgatctggctgggctagtttgttggagaaattccatgtcagtaattttatatcttttctcaaggattaggcagttttcccagaggggcttcattgaatcgccttcctgaagtgtgaagacctggctgccaggctttggagccaaatgggggaagactgctgagggttttataaatctactatcatacattcacttattcccattgtctctcgtgcagtaccctttcctttggctctttctggtatctgccagaatctagataccctcttattcacagagtaaacttccagtcttttgtcaaggtaggggagaggcagttgcctggttatatggagtggggaggggatgcttctatgtttttcagcttccagaattttgttgctgttatcttttttgtttttttttgagatggagtctcgctctgtcacccaggctaccgtgcagtggcgtgatctcggctcactgcaacctctgcctcctgggttcaagcaattctcctgcttcagcctcccgagtagctgggattacatgtgcctgccaccacgcccagctaatttttgtatttttagtatagacagggtttcaccatgttggccaggctggtcccgaactcctgacctcaggtgatccgcccacttcggcctaccaaagtgttgggattacaggcgtgagccactgtgcccagccttctcttcttttattatattaatccttctggatttgttcctttaaacaaaacaaaacctttcatttcttttaagttgggggttgggaaagagtgaaagttgatgagtattttcagtctgccttttttctcctaaatcctgtgagatctttaatcattaaacaccgtctttaaaacatagcattgtttttagtcaactggtagtaaaaaggaaatcattgtgatcattactttttgtttctattgctggccttcatgatgtcttcatacactgaaacccattcccttcaactcttgaggtacatacccctcttatttagagttcatggcactctcaatctctaattactgctttgttgttttctagcttgctctgtctttcttctcaagctctgcaggtaagatttaagtgaagcatcagtgaactaaatttagcgccrtggagttgtgaagtaagtgttactggcagagctgaatcatcattctttggacattctcctactcttcactaacttagcattttttttttcaaagcaggttctgttttaaaaaaaataagctagatttatttgcatgattctttggagaaagagccttattttaggagtgaattgtacgtggtaaagaaaagaagggagaaatggatgaaggggaaagagatgtggggtgattagttatctcaatatcccttcgacaataccgtgatccttgttttctcagcctgagttttcatcttgataggaaactagtactttatttttctgtatcatagttaaatggaatatatctataaatagttttttccttgatagtggtaggagacatttcaagagcttactttgcattaacctcactagttttcttctagcttttatttaagtgttaagattttaacttttcagtcaaggcagaagagtcacaggtttaagatgttcattttagagctgttgtcaatctctatgaacccttattgactgctttagttttaaaatgtatgtatttcagtagtataatataatttttcccaactctcatctcaaccccttgcatctgttctcagctaataaagtatgtagagacttctctccccactccacaaatcaggagacttccttccagtgaaagttttcttgaaaattaaaccccaataaataaaacaaaaacatagctgttctggttgaagtatgtgaaggggatctggaggccctctggtccttccccctccacttagtgctaccagaattaaaccccaataaataaaacagaaacatagctgttctggttgaagtatgtgaaggggatctggaggccctctggtccttccccctccacttagtgctaccagaattaaaccscaataaataaaacaaaaacttagctgttctggttgaagtatatgaaggggatctggaggccctctggtccttccacctccacttagtgctaccagggcacctctttgaaatatttaggactctttggagtaatttgaaaaccactgatccagagacttttagaattgcatatttttagagctaaaaataccttttaagtctttgaatccaagtttcccaaatatgcctgatcctaaccatcctatggaatgcttgttaaaaattagatttctgaaatttacttcagrccaagttgtctcagaatctgtgctaacaactgccccaagtggtgattaaaattagtcaagtataggaaacatcctgctccttttggcagcggaggaaacagctgcaatgaactaagtttcttaggcrgggttgtctagttttagtttttttaaagaaattatgtcttactgacttaaatactgaactgagtagtcagtcacgaattaaatctttgattattccagcccagtagaagctgaaaggagaaatccttagctagtaagaatgaacttttaagcctcaaggaaggaatgaaacagtaaacttgaaaaaggctggtactgatttagtattagcatgaaatataagcagatgaggattagcagatgaggagaagttaaatagcttttcaaactttgcgtgaatgacctctctgaggatggcttcctctctgagttcattcagaatttccacgatatcattctttttagaagctgaaaactaccttcaacactgacaaaaaaaccaacccaataatggcaacaatggaaaaataaaaacaaatttaattataccactgttttctgcattcttctaatgagaaaaaataacttccattacttagctgtttgactctgctttcatctacatttttctcacatgtgctttatatatagtgtctaaacattgctcttgtgattggtcatcatgactaattttacactgaacagtgaagtgagaaaaatacatcagctccagaaggggatgctactgatgatttggaagtagaataggttagagcataatgtgtatgaccatttattsaggcaatctgcaaatatttattgattacctatatgagacagaccctagctaggtactgggaatatactgagaatatactggtctatatatactggcctctacatatagcatgtaaaccagtagaaatgtcatttatacttttaatctatagaattgccttattatagtgaccgaatgctattctgcttttgatggtgatgtgttaccctaacactgattaaagaaaacaatactgaaacaaaaatatccatattctcttaaaatggrcttgtccaaactataaaattgaatatcacatttacctttaggattaagatataaccccactggaaaacttttccttgccttctaataccagattttaaaattattttcaaaataactctaatattatgctttaattggtttcttttcacctgccagtagctattcttgtgaaagaagtctaaatccttcatgtagtcttggtttacagttgttctcttttttctgcttaatggtaaatatcagaaaagagttaacagttgaaaaaaaattagtaaatgcagtaacaagaaagccagttagtattcctgtgctattatttattttgcttatggcgctctataagatatcgcagtgttttaacatgaggatgtatttgttgcaggttattgacccagtggctccacgatatgttgcattactgaagaaagaagtgatcccagtgaatgtacctgaagctcaggaggagatgaaagaagtagccaaacacccaaaggtcactcttacagtttcaccartgtgtttctctctgttaaaagaaggagcaggaaataaaaaggaaaatgtgctttcatggcagtggcatgattttgagatgattttctttctttctttctttctttttttttttttgagacgtagtcttgctatgtctccaggctggagtgcagtggggcgatctcggctcactgcaacccctgcctcccgggttcacgccattctcctgcctcagcctcctgagtagctggaattacaggtgcccsccactacgcctagctaattttcgtatttttagtggagatggggtttcaccatgttggccaggttggtctcaatctcctgacctcgtgatctgcctgcgtcggcctcccaaagtgctggaattacaggcgtgagccactgcgccmggctgagatgattttctattcaacattgtcaggatttgatactaatcgaagtaaatcttttttggattttttgccttaaaaaagtttattttagtaacaatccatagtacatcacacagaactgttatgctcagttggtgcttattttttattgtgtagagttagcatattagtgtgtaataagaatttatctcttcctagagtaatcctgaaagatgagttataattcaagctcctatctttatrtggaatctgaagtgcattctctattaactagggtattccctgtcacctttgtctttaagccaaaacattagacctactactgttgaatcacagcttgacttcagagtctcttacactgtcatttcctctgtttggaaagtrtaagtgaagggtccatctaaattctgaatagaattttttttttttttttttttttttgagacagttgcgctttgtggcccargttggagtgcagtggcatgattctggctcactgcaacttctgcctcccggcttcaagtgattctcatgccttagcctcctgagtagcttggattacagrtgtgcgccactacacccagcaatgtttgtatttttagtagagatggggttttgccatrttggcggccaggctggtcttgaactcctggcctcaaatgatctgcttgcctcatcctcccaaaatactgggattataggcatgagccactgtgcccagccctgaatagaaatcttaaatacaagtaccatagagtacttttttgttaagctgtggtcatcccagatccttatgactgcttagttgacaattttgaagcaaaacaagattttttttttttytwaattttgaaatgggccttgctctggtgcycaggctggagtgcagtggcctgatctcagctcactgcatcctctatcttggtctcaagtgatccttccacctcagcatcctgaatacctgggactacaggttcatgccaccatatctggctcatttttgtacttttttgtagagacaggtttagaccatgttgccaaggctggtatttatagaggcagggtttcaccatgttgcccaggctggtaaaagagttgttttatttcagctttacaagttgtctataaataactttattatatactgaaaattacgttcacagactaacgcatatactagtagccaagcttataactgtgttcgtagactaactcacatataagatgatgtgcattgcaaagagctatacatattctaaattgtagctttatatgattgtcttcccatgtatgtcattatctactttttaattttaaagatttgaatcctaataagatttggggtgcgcgtttagttgattggtttggctttgtctttctttatatctgattgttttgaccaggtaagtagtagtatctgacctgccatatcacctaccatacagttagtataaatctgaagcatattgaatattttaaaatttgaatcwtgagaataaaagttttgaagggtgcttattttttaaaatgacagttgtggtctgatagtttagattaaattrctaggttggtggcttatgcctgtaatcctagcactttgagaggtggaggtgggaagatcatttgaggccaggagttcaagaccagcctggtcaacatagcaagactctgtctctacgaaaaataaaaaaattagccaggcattatggttcatgcttataatctcagaggtaggtggatcacttgagctcaggagttcaaggctgcagygagctrtgactataccactgcactccagcctgggtgactgatcaaagccctacctcaaataaaatttaaaaaattaaattactaagtactgctcattgttaaaaataagaactaattgttaaggaagcacactcttaaattgtgactggattactcagtttgctctgtggaattttcattataacatttccgtcgcaaagtattttttatttagcctgtcagtattctattctgagcttagtatgttatctrttgttaaaacatactgatttttctgaaatgcattggtgagttcattgaacagttgttaaacacatgctggttaatgtttatttcaaaagatcttcttactttttttttttaattctgccaaataaaaactgaaattatggcgttctttttattctccgcatctctttttctttccatatcatacacactagaaaggcagaaaatttacttatctatatctatatagataatactttctttaaagtttgtcttctaaaatctgaaaggtccataatttcctgctaaggtggcatctgttgtcctataatgtcccatagccactgctcaagaatgacttattttctcctttgctgcagaagcagtgagattcttttatcttttttttttttttttttttttttttttggtgacggagtctcgctctgttgcccaggctggagtgccgtgatgcaatctcggctcactgcagcctctgcctcccaggttcaagtgattctcctgcctcagcctcccaagtagctgggactacaggtgcatgccaccacgcccagttaactttctgtatttttagtagagacggggtttcaccgtgttagccaggatgatctcgatctcctgacctcgtgatctgcycacctcagctgggattacaggcgtaagccaccatgcccagcgaagcagtggccacccaaagtgctgggattacaggtgtgagccaccatgcccggcgaagcagtgggattctaaggataggaaacagattctagttgaagagatactaaatgataaagtatactgtcttagctgtgaaatcaatgagtcttgtaggctggaagtaatcttargggcaagctacctcatctaattccattaacattagtggtcaggttgctgatctgatgtcacagagctggaattcaaactattgatttctattgaggccgagtatgtattgtttaaatgctaagaacagaattgggaatatgtttatgttaaaatacatagatggagaaagagtaaarcattttcttcctaatacarcaatgaactgctaacagtttagtaacacagaagacttttgtatggttaaagaatagaatgaatgtataaatttgcatactgggttcaataagttgttgtttcaacagacactctgcttttctttatcaatcagaatcctgaggttggcttgaagcctgtgtggtatagtcccaaagttttcattgaaggtgctgatgcagagactttttcggagggtgagatggttacatttataaattggggcaacctcaacattacaaaaatacacaagtaagaactttttgtttgttttcaaataaacrtaggagaaaagtattttatttgtgtttacttattaaacattaccaaattcagacccatacatgttgctgactagtaaatctgcccagacatagctactgcaaattctggacacaagttaaatttttttccatatatctttcagtttactaacaggctatcaagatgtcttttatttgtggtgttgaaaattactacatctggatataaaaaatagttgtaatgctttaatgagaaattacatgataaaaagggactctatacagttgcatgacatggggatcttttagacagaatttatatgtataacataatctttwtactaaaatttactttaaaactgattggttaataattaatttgactttctagttactatagtgtgctacacttaggaatatgatcttcagattctataaatgaaacatagtatgcttaagactgatttatgcaaactctgaaatcttaattgcgtagttattacatatgattgcaagtaactgccaaatgtttttaaacatagtaattcaaattttataatgcttgatgcaggtgactttaagttaataaatatatacatgttcctcatcaattgtatgtgaatctgttctctagttgattrttagtatctcgatgtcagtgattatgttgtatttattaaccaatatatgtctggcatgttagaagctcaaataaatgtttgatttggaatttttccaaagaaaatttcttatccatttattacaaaataaaacaataaattattttataataatataaaattattatagaacaaaataatgaatttatggcagctgtggttaatatttctttgaatacttttaatcttatatctagaaatgcagatggaaaaatcatatctcttgatgcaaagttgaatttggaaaacaaagactacaagaaaaccactaaggtcacttggcttgcagagactacacatgctcttcctattccagtaatctgtgtcacttatgagcacttgatcacaaagccagtgctaggaaaagacgaggactttaagcagtatgtcaacaagaacagtaaggtaaccttccaaagaaaccatatttcacmttttaaattttcctttagaattaaaaaaattaattttatatatttcggatcctcagataaaatggataagatgtgtagaattttatttaaatcaaawgatgtaagttggccgagcatggtggctcatgcctgtaatcctagctctttgggaagccaagatgggtggatcgcttgagctcaggagttcaagaccagcctgggcarcatggtgaaaccccgtctctacaaaaaaaaamaaaaaacaaaaaaaaaaacgatgtaagtaatgtttccattttatagatgataggaagtgaaacacagtgaagttgagtaacttacctgaggacaaacagtaaatagtagagttgggattcaaatctgaccctcgtatttaagccttacgccagcatgcctttcacctaagtctattacatgcttcttgcatcatatttcatatttatagcagggaaattatttcttctggaatgctaatcaagttatttaaaaggttttttgaggccagtttatgaatgttaacttttaaaaatgtgataaattgaattgtcatttaacacttcaccgtttcattgtgtgtcctcaagtagtgaactttttaacatatctgtttaaaatgggagtattttagttagtggaaactgcttgcattttagagttattttactactatgattttgagaaagtgtactttggttttatatcatctttacagcatgaagagctaatgctaggggatccctgccttaaggatttgaaaaaaggagatattatacaactccagagaagaggattcttcatatgtgatcaaccttatgaacctgttaggtaagtaaatgtaactgaacgtctaaatgaaaatgcttaaagttgttatagtgagtaatattttagaaattgaactttcactaaaataacgtacctaacagttttctttctcagtctctcagttttattttatatttaacattttagacaagtaatttattttaacaagtgatctttgaaacaacacgcacattgaacattaataaattattcatttctgaaattaaacctcttataattaactttcctgtagcccaagtataaagaacaaaatttcagtctgtatattacctatctttgggtgaaaattattaccattatctttttctttgtagtgtattttcactagataaatggtacaaacagcatacatttagagggaagaaataaccagtatttgtatttttttttttaaccatgaagtaataggattattagaaggagaactctatgtaaatttttgtcccttttttttcttttctgtttgtctctgctatttttttaagtgatatctctgtaactgtgtagtcaaaacgcctctcctgagatttagtcttgtgaatctaactgctttagatatctgtgaatagattctttcaagcatttcaaactcaacgtgttcaaaattccaggatctaggtgtcatctttgayttatgcttccccttcatcccttttttcactcagcaaactctgtcgtttgtgttgcccatctggtccatctctgtggatccactgctctgccttatttcaggctataacattgcttccttgattgccaaaacaggctctcaggtatctccttgcctccaatttcatcctttttctgttcagttttcacatgcccaccagtctgaaaatttaagagtaacagttttatcacatttctctactgttaaaaaatctctattagtagggcagccactatgacttatgcctataatcccagcactttgcaaggctgaggcaagaggattacttgaggccaggagttcaagaccagcctgggcaacatagtgagaccccatctctacaaaaaattataaataaagaattaaccaggcatggtggtacacacctgtaatcctcactgctcaagcaggtgaggcggcaggattgcttgagcccacaagttcaaggttacagtgacctataattgcaccaccacactccagccttggtgacagagcaagactctctcaaaaacaaacaaacattrttgttagtttcagagtaaargctaaacttttgagtttgatatgcaagatttttcatgttacggcgtctcttgagccataggtgttggagttttctcgccctgatcccttctttttaacatatgtaccaaattgcctggggcttttcaaaagcacttgatgccttttcctggaatggccttgtggctttttcgtcatatgagtaaccttattcattttaatatcacatttcctttagtcacataagctcacgcatgcatacagtgtagcatagtgcctaatagttgctaagccctccttaagtatttagtaatggtggtggtaccaccaactaaaataacagagtaggttctcattttattcttagaaagtttttgaacttttcaacaaatagtgctagaagaactgaayagctacacatgaaagagtgaagttgggcactttctcatatcatatacaaaaattaactcaacatttatcaaagacctaaatgtaagagctaaaaactataaaactcttagaagaaaacgtgaatgtaaatctttgtaaccttggcaatgctgttttggatataacacctaaatcacaatcaaccaaagaaaaaaaataaattggacttcatcaagattaacatatattgtgtttcaaakaamgtgaaaagataagtcacagaatgggagaaaatatttgcacatatgtctcttaaaggacttgtatccagaagagaacccaattaacaatggatttaagtagacatttcttcaagcagatgtacaaatgtaagcacatgaaaagatgctcagcatcattagttgttagggaaattcagatgaaaatgacaatgaaatatcattgcataccactaggatggctgaaataaaaaaagacaataacaagggttagaaatgtggagaaattggaacccatatgtattgctggtagggttgtagaatggttcagccactttggaaaaacagttggatgattcctccaaaaattaaacacggagttaccatttgatccrtcaattccattcctgygtatttgccaaagaaaaataacatgttcacacaaaaatgtgtacatgaatgtttacagctgcattattcataattgccaaaaagtggcaatagattattgctaattactataccctttgaaattgagaaattcttataaattattatttttttaagagacagggtctcactctcacccagacttgagtgcagcggcttgacctccccaggctcaggtgatcctcccacctcagtctcctgagtagctggggctacagatatgtgccaccacacctatctagtttgtgtattttttgtagagacagggtttcaccatgtttcccaggctagtcttgaactcctcggctcaagagatccacctgccatggccccccgaagtgctgggattacagatgtgagccaccatacccacccttaaatattttaaaataaataaatgttttacagaaatttttctgcttataagcagattaggtgtggtatgtagacaaattttcttgaagtcaagagtatcattaacattcactaacgccctttctagtggcaggcatagcagrtataattttgccctggacatagtttgttcatatggacgaaagttcatagattggaagtttgtaataaggactgtcaattttttttcttttttttttttccattgaggcagagtttctctcctgttgcccaggctggagtgcaatgatgcagtctcagctcattgcaatctccatctcctgggttcaagcgattctcctgccccagcctccaaagtagctgggattacaggcgcccgccaccatacctggctaaatttttgtattttttaagtagagacaggtttcaccatgttggccaggctagtctcgaactcttgacctcaggtaatccacctgccttggcctcccaaagtgctgggattagagtcatgagccaccacggctgaccaattttttttttttctttggagacagaatctcrctctgtcacgcaggctggagtgcagtggtgtgatcttggctcactgcaacttctgyctcccaggttcaagtgattctcctgcctcagcctctggagtagctgggactacaggcacccgccgccacgcctggctaattttttgtattttagtagcgatggggtttcaccgtgttgcccaggctggttttgaactcctgaactcaggcaatccacccgccttggcctctcaaagtgccagtattataggggtgagccactgcgcccggccaagactgtcaatttttatttatgcatttgttgtttgtaaaactattctgaagagcctctgatttgaatagtaagacaatggactattttatacttcaaaaagcattaactggacaggtgcagtggctcacacctgttatcccagcactttgggaggctgaggtggccggatcacttgaggttaggagttcaagaccaggctctactaaaaatacaaaaattagtgtggtggcatgtggctggtaatcccagctacttacaggctgaggcaggagaatcacttgaacgcaggaggtggaagctgcagtgagcttagatcacatcactacattccagcctgggcgacagartgagactrtctcaaaaaggaaagaaaaaaagaaagaaaagcattaacttagtgccattgaatttatctaggaattcagtgtttattgctgttcagataattttgttcaaataaactattttgtccctttattttctttttagcccatatagttgcaaggaagccccgtgtgttttgatatacattcctgatgggcacacaaaggaaatgccaacatcagggtcaaaggaaaagaccaaagtagaagccacaaaaaatgaggtaatgacttttacggatatgtgtataaaaataaatggtctttctatcccagggtttagaatatatttctttacagatgattatctttcttactgtggagactgaagaagacagttaagtcttgctctttgcattttgttgttatcctttcatgtaagattttaaaatctcactctcacccaaggctggagtgctgtggcgcgatctgggctcactgcaacctccgcctcccgggttcaagcaattctcatgcctcagcctcctgagcagttgggattacaagcgtgcaccatgacgcccggctaatttttgtatttttagtagagacaggcttttgccatgttggcctggctggtcttgaactcctgacctcaggtgaaactcccacctcggcctcccagagtgctgggattataggcatgagtcaccgtgcctggccagaccccttatactcttaagaatgatttgcttatgtgggttatatttatcagcatttatcatactaaaaattgagaagttttaaaaggatttaattcatgtaaaaataataaatccagttacatgttaacatacgaaaagtttttattaaaaaaaattttccaaaataaaaattttagttaaaagagcggtatggttttaaatttttacagatctctttaatatctgacttaatagcttctaaaaacctgtacaaacagtcatgagagaatgagagcgaaaaagacaaaatacatcgtaatatagtgaaaatagctgtgactttgcagatcccctttaaaagggttttatataccccttggggtctgtggaccacaccttgaaaattgctactatatattattcaataactcatggagtaagcatgagatgggaaatttggttgcttttccctcattggttccagttcccatctgtgcctatcattttttacatatcctagaaagataactggtgttatgctataagttagtatgtgttcttgaaaaacttcatgttctgcaaaatcacataccgaaaataacagcygatttttcaagaaaaacagagttgaggcaaaccactaaaaacctatgtatcycatgtggtttcagtcagatggtggctgggtagcagtcatcaaagactcaactgggctgtattctatttttattttattttatttgagacagagtattgctctgttgcccaggctggagtgcagtggtatgatcttggctcagtgtaacctccacctcctggcttcaagcgattttcytgcctcagcctcccaagtagctgggactaaagtcacgcaccaccatgcccagctaatttttttatatttttagtagagatggggtttcgccatgttggccagactggtcttgaactccttacctcaggtgatctgcccacctcggcctcccaaagtactgggattataggcatgatccactgcacctggcctgggctggattctaaaattgtttcctcacctggatgccaagttgatattggtgttggctgggagctcaggtggaatagttgactgcaatagctgcaagtggcctctctagcatgacagtggcagggtartaagacttcttaactatcatttaaggcctccaaaagtgartgtccagtagatgaggtgggagtagcattgcattttaggatttagacttgtaagtctcacataacatcatttctgctgtactctgttggtcaaatcagtaacaagctttctcagattcaggaaagggcacagagatcccccttcttggtgggaggaaagtcaaaaaatttgtggacatgctttgaaacctgcacacttttgaatagaaattcaatattcaggtacagttgactgccacttatacccaactttgcagtcagagatcctttgcagctttaaacctgaaggataataatgcttttccctgtgatgtgtagatctttgaggatatttttctccaatagaggctgatactatcaaaattaaattctcatccagggcttaatgttatggtaaaaaatgttttttaagcatcatcctcattaaaggaaggcacttatatgaaaggtttttgggtttttcttcagattgtcaatgtatttctaaagttttctctttaattatgaaaagcttgttcctgcatgcttctttatttgacataaaactggaatacacagggaaaaaatcacacacaaggcagtgtgattttttttttttttttttggtgttacactcatatgttcccctgtttactaaccatgaatgagatgatttatgttgcaaattaaatgtagcagaacaggccaggcgcagtggcttaagcttgtaatcccagcactttgggaggccgaggtggacagatcacgaggccaggagattgagaccatcctggccaacatggtgaaaccctgtctgtactaaaaatgtaaaaattagctgggtgtggtggtgcaggcctgtaatcccagctacttgggaggttgaggaacagtaatcacttgaacccgggaggcggaggtttcagtgagctgagatcacaccactggactccagcctggcggcagagcaagacactgtctcaaaaaaaaaaaaaaaaatgtagctgaacaaatatatatttttgatatagggtggctacatgaattgkattatttatttaatgtatatgcatttatatatgcatattagtgtttgagtgtayatatagaatctcactaaaaataaatatgagtgatttaaggaattatggggaaggaattttgagcgatgggttttttttactgacatgcccactttgagagcctaacgcctgtgtaaaatgcaactctgatacagcttgagatgcctgttaagtgtctaggtaaagatgtcttgaagacattgaaaatgctgggtctgggatcaggacagaattctggaatagagatgaaaatttttggaatttgtacataagactgtgaatatggataagattattctgaaaaattaagtggcagatcatttaaaagaaaaaagctgaaagaaaggtataatgtgagctgggttttaatgttagaagggtttcagtagggaagaatgcagtctaggcagcagaaagcatgaataaamatagtatctttattcactcttcagggttgattttagtgaacatagctctagattttatacacaaatagatacctgtaaatttataattttacacaaatgaaactgttccacaacaatgagttacaattatatcacagagtttgatggagctcttgccttatcaacaatctagatgtatttcatctctaaaaaaattaatagtgatacctaatgcttattgatattcactttttctcagcctttgtgactaagggctttacacagattactttttattttcccatcaacttgatgggttaagtatggttatcccccttttatagtaaggaaacagcttaaaataactcaaagttgcacagtgagtatgtggtagagcagtgatttattctcaaacttgatggatatgttataatttctttagtcccctaatgacaaagatttagggtattttcaggtttttactatagtaaaaatgcttcagtgagtatgtaggtacctctatctttgtttacgcctgtcatttttcattaggataaatacttaggagatyattcatttaagctttttaagggattgaagtttaaagtttctgtttttaattggaaacattataaaacaatcagtttgaaataattttgtgggaaaacatttaatatgaattaattattttacttttggttttctctcttggtagacctctgctccttttaaggaaagaccaacaccttctctgaataataattgtactacatctgaggattccttggtcctttacaatagagtggctgttcaaggagatgtggttcgtgaattaaaagccaagaaagcaccaaaggaagatgtagatgcagctgtaaaacagcttttgtctttgaaagctgaatataaggagaaaactggccaggaatataaacctggaaaccctcctgctgaaataggacagaatatttcttctaattcctcagcaagtattctggaaagtaaatctctgtatgatgaagttgctgcacaaggggaggtggttcgtaagctaaaagctgaaaaatcccctaaggtcagtatgttagagaaagtcaagaccacattttcagtgtgtgaattcaaactgcttagagtagtctcatcttcttataaaacatcractgctcatattttgatgtaataatcaacattgattgatacctgctatgtgccaagctctgaaaatatatataagaagctcataatctagtggaggggtgacttactggggaaggaaacatacagactcagtgtactcttatgtgatgtgactgtaatcctttgtgatatgtataagttgctatgtaaagggtttgtgttcttaagtggcaacaaaggtggaaaycatttataaaggatatttaaaatcatcctgaagtagaagcagccattatgggggaacaaagatcacaacaaggcactctttaagtgtggaaccatggttctcaagctttactgtgcaccagaattactggcttggtaaaacatggattgctaggccctgccctttgactttcttctgcagtagattcagagcacgtggagaatacgcatttctaaaatgtttctcaggtgatgcagatgctactgtcccagggaccatgctttgagaactcctggtgtagaggacagtaccagcagaggtagaggtcagcaggtacaaggtgtattcaaggaataacaaatggattgtcaagaggtttttgacctgtgattatctccagcttttcatagcagagccttcaaattatatgacattttgactgaagtataaattatattcttgtttcagtatgtccttaggcaaaacatttagccaagtaggtgtggcacctagtgtgaaatgggcttacttgatgtaggtaagagacaaagggaatggcatctgtatagactgtgaaagatcgtatttaataatgaaggtatgtagttctcctcaaacagcagcatagtttaagacatgatcagataaatagtactgcaacgaaaaacaattcagcccctgatgagctgccaraaattgtagaatttaggctgtggcacatacacagagaggtatggtacaccactaggcttgacttgtgtggcgggaaggggatttgttctaaaatgtcagatctgttgtcctgtcagggtcctaggctcaggctggagaattcagtaagttcttcaccttatcaacaagttgctggcayctgacatgaaacactgccacctaagatactttgattcatgaatatttgacctcatattttgaggtcttgccccaggagttaatatttttctgtctctccattgtgaactgttgagaaatcctttattaggtcagtgcaaaagtaattgcggttcttaccattacttttaatggcaaaaaccacagttacttttgcagcagcctaaatagcctgttgagatcccgcagaaccatgattatctaaaacagctttgcttcaaggaataaatgctgctggatgtatgagtttaggatataaattccagatgtttcttacctcatggggaggttgggagcattttgcactgtatctgttggacactaaatatgtactcctttttaggtgtaatttggagggaagggctttggtcttcaaatttattcattgtataagtagaatatattgagattctgtgccaatttttggtcagcttaattatgggtggaatagtaacagaagcaaccgttgtacttggagtgacagtcaactaygaatccatcacccatccttttgggttaatgggttacatcatgctttcataaaatatcactgttgaggttatgaaaagtcagcttaaggtaaaaagatctaaatttctttggtaattgggcaggtacttttattaggtattttaatactaatgtgatactgaaataaatctgacttcagtttagtctgacttacatttattgaatgcctactgtataccatgtctgtgtttcaaaatatagtaagtcttaatattgttcataggttcttggaaactgagactttaagcaaaatggtgcataacaacaataggctaattgagataaacaagaaattaagtaggccaggtgcggtggctcatgcctgtaatcccagcactttgggaggcygaggtgggcagatcataaggtcaggagatcgagaccatccttgctaacacagtgaaaccctgtctctactaaaaatgcaaaaaattagctgggtgtggtggcgggtgcctgtagtcccagctacttgggaggctgaggcaggagaatggcatgaacccaggagggaaagcttggagtgagctgagatattgtgccactgtactccagcctgggcaacagcaagactctatctcaaaaaaaaaaaaaaaaaagaagaagttaccacggcatatttctgatctcaaaaacatcgcattacacaaacttcttgtgtttttttattgttgttgttgtcttcattttttctttttcttttttaatattttgtcttttctttttaaaattattatttttgcattacacagacctctaataaagacccaaacacttctaattgaaacaaatgtgagctgtatatacatttaagaaagatgaataaagacaagataattatttacccatttattctagttcagggttttgggtggccagagcccatccttgtagctcagggctcaaggcaggaaccagccctggataagacatcattccattgcagggcacactcacacacacygacactcagaccgggagcatttagactcaccagttcacctaatgtgtgcagctttgggatgtggaatgaaactggagttcccagagaaaactcacacagacatggggagaatgcacatgctccacacagacagtggcttcggctggggatcatgttttttttctctaaaacgttatgatgaaatgacatcaaacaaaacaatgttattcaaggacctgctgtactccgtatattttttctccgaatgctaatagtagtaaatgtttcttctcttctaaagaacgaacccagttactaggaatggaacgcatttagcctgcatctggcactgtgtactatacactttttagtcctcccaagagccatgtacaaaaatattcaaagaatgctactttttctatttgcttgttatagcaacagaggagaaactgaatatgaaagtaacttcctgaaatttgcaaagcctagattaaaatattgaccgattcccatgttatttaccttgagaggtggtgacagtggggtactccattgaaagcgctagagagttatagttttactagcttatcattatttagcaagtctgtgcttgttttacattaataatttgcctaagcttcttaactattcagttttctacaaaggtggttattttactatgtcatgttaaatggtaaggaaggtgaccagctgaagttttaggttaccagcttcaactagacttttcttgctctgttttttgttttgtttttaatcttctctttcctgcttcaggatcagatagatgcttctatgaaagaacttttaagtgtaaaggcaaagtataagcaaaaagacgggcaagtaataaaaacttgaagtccatcaagtctaccatcttttgctcctcttattctttttctcctgctcagtaggttgctgcataaaataatggatcaagttggtgtagtgtgaggtgcataacagagaatacaccaaagatataataacactgaatactaagttactttaaaaactaaagcactttaaaacaatttttttttttttgagacagggtcttgctctgttgcccaggctggagtgcagtggcttgatcatggttcactgcagcctcgacctcccaagcaatcctctcatctcagtctcctaagtagctggaagtacaggcacatgccagtatgcctggctaatttttgtattgctcatagagacggggtttcactgtgttaacaaggctggtcttgaacttctatactcaagctgtccgccctccttgacctctcaaagtgttgggattactgatgtgagctgctgggcctggccgtacgcctgttctttgtaaatgaattttttttttgagacggagtcttgctctgtcacccaggctggagtgcaatggtgagatcttggcgcctccgcctcctgggttcaagcaattctcctgcctcagcctcccaagtagctgggattacaggcgcgtgccacgacacctggctaattttgtattttgtttttagtagagacagggttttaccatgttaggctggtctcgaactcctgacctcaggtgatccacccgcctcggcctcccaaagtgctgggattacaggcgtgagccactacacccggcctgtaaatgaagttttattggaatacagccacactcatggtgtacatatygtctatggctgctttcatgctacagttagagttgaatagttgcaaccaagactcacatagtctaaaatatttattatatagccctttatagaaaaagtttgctgatccctccatggaagaaagagttttgagaaccattgtagttaacagttgtttaaaaatcaagtaacaacaaaataaaatgattattaaataaaaataattcacaattgttttgtcactaatgttctctctctatgccatacccagtctatgtggaggggagttgaatcaccatttgcttctgtagttgcagcattttaattcacggcaccttgtattttatgtccccaataattcatcttgccaatctttgctcttttattttttacaccaatgttattgttttttaaaacccaaaccacagtttatcaggaaaggacatacatccctgtacccttttgtccattaagcaggttgttctaggaagccgccaccctgcactctcaccccagatagctttaagatgtctcaggccaaaagataaaygttgcagggaaggaaacaagaaaaaagcctatctttttcttgatgttgtttgtaattcttatttgggatgtgtgtagtgaattccagctatatctatttagtacttaatgcaaaattgattttgatctaaacaaatataaatacatcttacatcagattatggttcaggatacttcacaagacttacatcagcttggggatcttctggaaaatcttcagaatttgtgttaattgatttgtatcrgagraaaatagcaggtaaattgtgatttaggtaaacgaatcagcccagttgataagcaggagaacaggtgttgtgttctaatttaggtttgatgtcaggatctcggctctaccctgtgctgtattggctcctagaatcaggtttcagtaatckgttattccttacaggtgtaggtatttaagctatgcacaactggttaattattttcttaaaatgcctctctttgcaacctgtgaacttctagtttactwagtctcctagcagactttaaaaaatataatacaagcatcatcactctcttccctcactcasttggaaggattttctgttctgattacctttcattcatccccctcccaaccaagtgagaatctctgctttcaggagtcatcattaccaacgtgtgtagatatagttctcttagatatgctagtaaggagcaaaggtgagtggtaataaaattggaaaaaacaagtttgaaaaaagtattttttgaaaaaagttttttcatttagaatcgagatatccaggctattttgaaaggttctagtatttcaaatggataatgttccaggtttttttttttttttttttaaggtcactcctttccccatggagaaatgtttccatctagtggctgctgaaaaaatagctgtttgagtactcattctgaatgtaatcagaatgtaataaaaaaaaattgtccattttctccattttatttaactttccagtttttagtcataacattagcatcacttttacttatttccaattcccatcttaaacctttaccaaagtcttttgtataggttgtttcttttctcattaatccacatcagcaattatttgctgaaaaccttttctgtttgtattggyatatgttaggtaagtttaaaacagtctttgtccactaacaacttaaaatctactagcaatgctctctcagcttctgctgttgtatgatattgtactaaatcatagtataccacccaattcctctttgtaaatgccttttgatccagaaaactagtatattaagagataatttgttctccayccatttgttcttcattgtgtattctaagagataaattcaaagtaatagtcaaacatctctttcgaaaagcagttttcctagcatgttactaggattaaaatgcacatttagatctttgttttctgtaatccttagcaaaccgtagtggtcaagatcacagcctctggaataaactygggattcaaatactagctctactacttattgtgtaactctggggaaggaacttaatctttctaaacttgacaacttctctaagggttgttttgagagttaaataagataccacgtaaagcacttagtgtagtgtctggcacagactaaatataccataaaatgataatgatacttttcatattataattcaaattctctcaagaatctttaggtaccttctaaatcatcagggaagattgcatagtggtgattagtataattttactctttttggaagaataacctgagtaatttacttagttatctagaatattccatttcctaatgggaggggaaatatatgaatacatagctttattaagagtatctcattgaataacagagtggtttgctcaccttaattttctcctttataacgtttcaaattataatcttggcgaacggggttttttttttttttttccgtgtgaaaagtgtgccatctgactttaagctctaatgaatacctgcttatagtgtaaaatggagcttctttcaaatagtcatcaaatagtcatttttctagaaatagttgcagggaagttccttcttttccatttttattttagctggtggaaatttcccttttttccccccttgattctcataygtctgattaacttggccstttttcttgagataaagtagtttctgctgtgaaaactctttcctaaaaacagaataaacaagagacacaacaggagtacaaatcagacaatctactctcatcttctctttgtacattttctcttaattttactacctttgtgtggtacctggtatgacactctaataggcagaaaacgttataaagtagctggacaaggaaatgtgctttgctgcctcatagatgcaaattttktgaaggtataccattggtatcctgcattcctctgatgcccatttgagtattcttcatggcttctgcctggtttcatttagctatctggarcattattcgaatgtagcagtaaaaattggatagggtgatttggagacacttttcctatctattttgattgatacctccaagttcccagtggtacactggtttgtggtgagatagtagcaccatttcaggtaaggtgtccagcttgggccctttgcctgtgttgctatcattctctgctagagagtcacaagtgtctcggtggggctgagtatatcattcttttttattattatgttgaagtatcagattaaaatatataggtaagtgtctaaaaacttcaacatgctttctcatctcattgtcagtttttaaaattgatataactattcattagttggacccaaacttcctttttttccccaaagttgtatttaatttctgtttaataagctgtggaaagtaaggtttgtataggcaaagccattgatctgatctttgttctgattttgtaaattctgacttcactatttatagacctaggtcttgacactgacagtttacttagatgttctattatttgtctgtttacttaagtaaaatagaaagttacactgttgtatgttgaattgtatttttgttwattcagcttatrtataatttatgtttttaatttagctttatcacttattgtaggctgatgatttaacataggtttccccatgattaacttatgggaatgatttgctgataattaaagatttttaaatggcattgaaatttccagaaatttccaaagttttrtaaatatctctttctctcttttattttaggctaaaataaatgaagctgtagaatgcttactgtccctgaaggctcagtataaagaaaaaactgggaaggagtacatacctggtcagcccccattatctcaaagttcggattcaagcccaaccagaaattctgaacmtgctggtttagaaacaccagaagcraaagtactttttgacaaagtagcttctcaaggggaagtagttcggaaacttaaaactgaaaaagcccctmaggtyagtgtgttattttgtttatatgcttttgttttttatgtttcagggtattgtctttgcctcaagtgttttbtgccccatcaaatctggctaacttctactcatatttcagttcttaattctcttaccttgccttttagagaaactttgttgattgtttcttacgccractagatttgaytggatgttttcatatgacaccgcccatcactgacatagtacttaaacagactgtattttaattgttaaattgtttgtttccctccaayctgtaagatccagaatagtgacctagaccctagcacagtgctcaccccattgaaggcccttaatatttaccttgtttttcattctttctcctaaagctctgtcaaactgaaatagtaggttttattttgagctcttagtagtttgtgctagttctttaagtgygaattctgttatctttttaggagtaggtttttctgtacagattcacatgagtggaagacagttgtagttttgaaatttaactttattagaacttgataaccattatctcatctttataattgtgaaatgttcaacttatrtaatttaatggctcttaacttagattcctatggaatacatgttagataccagtgctttctagtagaactttctgcagtgatggaaatatgctataacaatattgtctaatacagtagtcattagccacatgtggctattgagcatttgaaatgtgattgtggtgactgaggaagtgaatttttaattttatttactttaaattaaattcagccacatgactactatttggataatgcagttatagactgtgctgttttccagtcacagttttgcacaattctatccctgtttatcataatctttataatttcaatagttggtgtaacacctaccccaaacccctctgtccccaaacccctgtctttaattgtgtttgcagatctacttttaaactttggacagatccttttgtagttcctaagtgtgatggttgggttttcacactcatatgtgagatatgcctccctcaaaccttatcaccacctgggcacattccccgtgtgatattggcggaaaaaagaaagctttgagcattgtatttgtttaagtgtgcttagacaatgacttgagttaaatactgtcttctctttttcctcttttgttaaactaaaggatcaagtagatatagctgttcaagaactccttcagctaaaggcacagtacaagtctttgataggagtagagtataagcctgtgtcggccactggagctgaggacaaagataagaagaagaaagaaaaagaaaataaatctgaaaagcagaataagcctcagaaacaaaatgatggccaaaggaaagacccttctaaaaaccaaggaggtgggctctcatcaagtggagcaggagaagggcaggggcctaagaaacagaccaggtaatgaatcgcagaaacttcattkgaagcaaagcagtgaattaattcaaytcttaatagtttttaaaacaaattttgactggtttaaccatcacattaagttagagaacgctaaagctacaaygtcagcagatagcatttattgattttccatttagttttaaaaataggtaacacgtttgtttggttcaagaatctcagaatgtaagaagttcctgtgcrtgtttcccatctttccggttttccccaccaccgtaatcagtcagtagccactgttaacagtttcttctgtatctgttgagcgattttcatttattattcaagtaaatacwgatacacacacacacacacacacacacacacatacatattttctctcctcctttttaaacatgattggtagcctaattatacacattgttttgcaccttaagcagatttttttcagatgaagatcttttgtggggactaagtgagagcttcattctcaatttaaaaattgatagtttaaatataagacaaaactgactaaagacaaaatggttggatagagggctctttaaggatcttccaatctgtataaataatgtacggtcatacaccacataatgatgtgtcagtcaacagtggactacatatatgacattggtccataagattataatggagcatgtatggaaacctgatatatggcacttgatattggcatcgcagatcaagtgggggaaattattgatattcagtaatgttgctgggatatttggttttccatataaaaatataygtatatcatctaggtttgtgtaagtacaagctatgatgtttgcacaatgatgaaatcacctaacagcgtatttctgaaaatgtattcatgtcattaagtgacgcataattgtaattttttrtctgtttccacaattacagtgaactttgtgatgggtttcccttaatggcttacttaataagaagaaaaagctgttactgagatactttggttttacatttgtttagctgagtatcaaattttgctgcctcttagctctcatgtcatatacacaatgtctctttaaacaagagaatgcaacagttatttttccttttgactattaaactgaataaccagagttatagcagggtagaagagaatgtagaacttctcaccttttactttcttagtgcctgtgaaagtgctaggtttcacagagttattttgttgaggtatgtcatagtgaaacaatggagaatgcaaatgcaaatacattaaaatttttagccagtaaaaccttgtttttaaactccaaaaagagaccatctctatcctgaataattgttgatatttcaagaaaatgattattgtctgaaatagtttttttattggagacctagtttattttacaagcatctatctctgcaacttttattctagttaaaagaaaaacttgaggccaggcgtggtggttcacacctgtaatgccagcactttgggaggctgggatgggtggatcgcttgaggtcaggagtttgagaccagcctggccaacatgtcaaagctccgcctctactaaaaatacaaaaaaattaaccaggaatggtggcacacacctgtaatcccagctacttgggtgggggaggggggctgaggcacgagaatcgcttaaacctgggaggtggaggttgcagtgagtctagattgcaccagtgcactccagcctgggcgatggggtgagactgtttcaaaaaaagaaaaagaaaaacttacataaatttggctaatatgcacacatcagtacacacacatatgtgtgtgtatttatagccattgtttttattactttttaggtgttactttcagtgaaacagtgatcttactataattttaactggcataagattcttcttttttagtgggagaataggtgtgaacaggctgtgtctctattacaaatacattgccttaaaaagaaccttgtaaaagagatgtctgcatagaatcatagcttttgttacatttggctttcctagattttgtggacaatatctctcaactttttaagagatgtctctgctgtttttgtttctttcttttttttttttttttcttttgagacggagtttcacttytgttgcccaggctggagtgcaatggcgcartctcggctcactgcagcctttacctcccaggttcaagcgattcattctcctgcctcagcctcccgagtagctgggattacaagcatgcgccaccacgcctggctcattttgtttttagtagagacagggtttctccatgttggtcaggctggtctcaaactcctgacctcaggtgatctgcctgccttggcctcctaaagtggtgggattacaggcgtgagccactgtgcccagcatttctactgtttttttaggttaaaaacattatcttaggggctaggcatggtggctcatgcctgtaatcccagcactctgggaggccagaacaggaggattgcatgaggccaggagttcaagactggcctgggcaacatagcgagaccctgcctctaccaaaaaataaaaataaaawaataagccagaygttgtatgcacctgtagtcctagctactggggaggctgaggtgagagaatctcttgagctgaggartccgaggttgcagtgagacaggatcacaccattgcgctccagcctgggtgacagagtaagaccctgtctcaaaaacaaaacaagaaaacaacaacgttatcttgggaatgaatatagaagagttacaaatacagaaataactcatactgaagaaagactaatctattttgaactttagaggtttatttttattcaacctaaagcagttgctgaatgaagatatttatcttttacttttcacatctgcaggttgggtcttgaggcaaaaaaagaagaaaatcttgctgattggtattctcaggtgagtatgcattcagttgatttttatgttttaagtctgtcaatggctgctttttatgttcagattctaaaatatgggcacaaaggcaatagtaataatgttgtataatgcctttaataatacacagtgtagtcatttaacatgacattatttttcaacatgttaacataaagtcttgaattgaaaagcagtaccatgagatagtgattgattttttttttttaggtgagataaagggattaattcaaagccacaaagatatagtcaatagcagaggcaggattggaattcaagtttttttttttttttttgagacgggagtatcagtctgttgcctaggctggtgtgcagtggtgcgatcttggctcactgcaacctccgcctcctgggttcaagcaattctcctgcctcagcctcccgagtacctgggactacaggcacacgctaccacgcccggctaatttttgtagttttagtagagactgggtttcaccatattggtcaggctggtctcgaactcctgacctcargcaatccacccacctyggcgtcccaaagtcctgggattgcaggcctaagccacaatgcccggtggaattcaagttttatggagagtttggaaccctgttatatgttgtttttcagtatagtcaggtctgttttacttccattatgacctcccacattaaggggatgttatcaacagtagaagcctccagatttgaattttggttatcatactcttgccacttatactagaattttggttcaatgtaagctttaaagactatttttcttttaaaaaggtcatcacaaartcagaaatgattgaataccatgacrtaagtggctgttatattcttcgtccctgggcctatgccatttgggaagccatcaaggacttttttgatgctgagatcaagaaacttggtgttgaaaactgctacttccccatgtttgtgtctcaaagtgcattagagaaagagaagactcatgttgctgactttgccccagaggtaagtgagcttgcttttttattttttgcaatgttctctgacaaactggaaaatatattttcaacttttaacaaccaattttgaaaaatataaagccatttttrttaaaaagttctgtttctacctttatagcaagtaatgattttgttacattaattaactgacttttaatatttagaaggtcagtaagtgcgtacctttcctcacagtgaacagcagcgactattttaacttgcctaaattgatatagcaaaaattaaaacagaggaaatttgcctgcatttgtactgttgctccaaaatgctattgaaaaaaaagtatgaaaaatgattttttcttmctaggttgcttgggttacaagatctggcaaaaccgagctggcagaaccaattgccattcgtcctactagtgaaacaggtgagaataggcattggagtgcargagaatgctcactgaacgttagagacagcctctaaagttgagtctcagcttttgctttgtgatagctataatctctgttgacgatataacatttcatgaatgttgatgaagattgaatgcaaacttaagttgtctagagttttattctctaatattcattgtagagctcyttatcattaaattataggatttttaatttaaatactcatttttatgctgtaaatttttaggacttttcaaggagttttattcttagaataatttttattgttggaattgattatartattgcaaatgcaatttttatgccataattatttttaaattttaataatacatttaggtttgcattcatgtagggtgttcataggttgctaagtacttttacgtcatctcgtgttattctkacaacagtgttgtgaggaaggcagggaaagttactgtgatttccattttgcaggtaaagaaaagtctctgaaagattaaatgatttttctgaaattacgtatggtaaatggaaatgctgttggaaaatttgaggttttgggctttacagtgtctttcaaagtgatcattcatctgtagagttcaggattgtctgttcttattgatatttctagtgatacttttgtataatacattattaatattgtgataccagtttttttctctcagactatttggcaaagttttgtttgttttggtttactaattatagatcatgagcaggctattctaagacaggtatcttcactttgcacttcattgcaagagctttcatactctgagtagatgcatcagatataaattaattctgcttctcatacataactgctggattcagcaaattgtttagcttctrtaaactcagctttccacgtctttaaaactgagttatgataccttcttgtgggttgaatgtgagaattgaayaggtcaatgaatgcagagaacttaacatagaacatgacctttatttgtgtttttaaaaacaaaatgtgaaaaccgtcgaagtacattaactgttatgtgaagaatgtaaaatctgtgaagaatgtaaaatatgatcaagtttagatttgtatccttgagtaatacacttcatgaaatagataatactattcacttattataaacattggaaatatatttacacaaacatacattttatttttcaaatttatttattacattttaattcctattaattatcttgctggtttagctgttacatccctaaaggagaaataaagccttaaatgactgtctctattttcccgtgtctttcagtaatgtatcctgcatatgcaaaatgggtacartcacacagagacctgcccatcaagctcaatcagtggtgcaatgtggtggtaggtattcaccccctcttgtattctattattattcatgttcttttttttttttttaaagcacattttgtttttattttcaaaggattgggagtatggaactgtttttgaagtrtttaagataaattgtaatttttgattacttattatataaaatggtaataaaaattggaaagtggctgggcgtggcagctcatgcttataatcccagcactttgggaggtcgagcsgacagatcacttgagcccaggattttgagaccagcctgggcaacatggcaaaaccacatctctactaaaaatgcaaaaattagccagctgcattggcgtgcacctgtagcccagctacttgggaggctaaggtagaaggatcatttgagcctgggaggcagaggtttcagtgagtcatgattgcaccactgcactccagcctgggggacagagcaagaccctgtctccaaaaaaaaaaattgaaaagctctttataatgactaaattgttttcttgcctcttccagcgttgggaattcaagcatcctcagcctttcctacgtactcgtgaatttctttggcaggaagggcacagtgcttttgctaccatggaagaggcagcggaagaggtataaaaagttattttccatattaactatgttccattatttttgttcaggttctgcaattttgttatttaaaatgtatgtaacacctgttaaaagcaaaatcaaattaattcaaatgttcatggatttaagtaactgcttattggaatgttattattaaggaaataggctcttttaaatttttaggtgaaaatacttctggactttaatgtgtagaaaaaattatttttcaggaaatttgcattttgatactgtatatctttcttaacatttattttctcttatattctaaacatatatacaytttaaaaagttatttgacttctttttacattgcttcattgaatatctttcttaataagttcacactggctgctttaaccttttcataaaaagaggtttttattgttcagattgcttttcccacacaattagtcttaagtagtgcagttttatagatcttaatgaataaatgtaccctaaatttgaacacatttacatttaaaatgttacaggtcttgcagatacttgacttatatgctcaggtatatgaagaactcctggcaattcctgttgttaaaggaagaaagacggaaaaggaaaaatttgcaggaggagactatacaactacaatagaagcatttatatctgctagtggaagagctatccaggtatcaaactgccacacaggattcgtaggtcactgtaagcacagtccatggacagatccaataatttcttctgtcatcacagaagtagactcttttaaaaaataagtgtttcatgtactttcgtataataatttcaaacaaatctatcccattcctctgtctccatggttcgttaagtcatagtatgtatcctgaattactactaaaatatgaattcctttttaactgttgtaggtaaaattactgctataaaaggggctgcccagarcaaaatgcttgtaaatagtattttttgactaatcttaatytcttattatggtaattatgcttataattaaaaaccttatttaatgtaaaaaaagggagaaaaaaagtgtagtgccattttaaagcatgtgatcttatagtaatcattttcaagggcataataggttattaaaaatgaagcttatttttctctctctattttagggaggaacatcacatcatttagggcagaatttttccaaaatgtttgaaatcgtttttgaagatccaaagataccaggagagaagcaatttgcctatcaaaactcctggggcctgacaactcgaactattggtgttatgaccatggttcatggggacaacatgggtttagtattaccaccccgtgtagcatgtgttcaggtaaggaaaatattcctgtttatcactcattttataaaatacaagccatatttactaaaggaaatttgaaagggtgattttctgaatatcattcaggcagatttctctgataataaaaacaacgtggaatgcagtctggaccctagtgttttgtgactgtgtgtattatttatttattgtttcttactcttttaatttttaagctacttatataaacatttttagaagtcattttttaaaaacggtttatagtatgttaaatgagctgggcatgcaggctcacgcctgtaatcccagcactgtgggacgccaaggcgggcagattgcttgagcccaggagtttgagactaagcctgggcaacatggcaaaatctagtctacaaaaaattagccaggtgtggtggcatgcactgatagtcccagctacttgggaggctgggggggaaaaaawatatatatatatatatatacacacatatgaaaaatagattaagtgaaatatagtrggtcagatgaaaatgcatttagcacgggtaagtgatttgcaggtaattagtagacattatatataagattagaaatcacacagctgattcgtgttaataatatagccactggtaggtttcgacttctgagagctcattacttctatatctgtttctttgcatacatttgggacattgtgctgattctaggtggtgattattccttgtggcattaccaatgcactttctgaagaagacaaagaagcgctgattgcaaaatgcaatgattatcgaaggcgattactcagtgttaacatccgcgttagagctgatttacgagataattattctccaggttggaaattcaatcactgggagctcaaggtaaattcctaagctttatcttttacccccaacatctgcaatttgagtttagattttcctctgcatgtttttataaaacgaggtttctcattactttcctctattttgatagttgtgagttttcttcttcttcacttaaactgttgagcactgacacagttcatagctttgcaatagtgatacctaaatttaaaayagtttttgtggaagcttatttttattatgttagaataaaaacgatctcgagcgcttgtttatgattaccctcacgtaactagtatactaaaatgtttatgccaggaattcataaaataaataagttatttacatagaccaccagaataacagtacatggacatcacttagctgtgtttgttatagctaatagtgaaacatctgagattaattttattcttgagttttcacaccacattgtttcataccagtttgttgatttttattttgtttattaaagccagtctaaattctgctttattgtttgtaatataactttcatgtattgcacattgtcattaatagattatctgtggccttaattctgatttataaacttacaacatttttttcttatgctgaaagagggaatcttactggatctagaaattaggaatcgagactatataaattgatattataggtgacagtatgagagaatgtattgagattgcagctgcatgctttcaaactatggaagctcagcaatattgggatttttaggtatttatacatctagggttcccaaagttgctaatatttatcatcttatttgtttcacattgcccctgaggtaaatttcctgtgctgaggaatggtaattatattgataattgtttcccttttatgtaatataccagcttctttatatgcttttctaaacatgattttttttccatgtcatttcctttttaattgcactcctttttgcttacttataaatagctattgtgtgatgccagtagcagtttctctaaactaatttctacttaacctgggctataaaatgttaaaggagaaatttactgctggctactagcgggattaaaaagaaaaaaccatccacgttcattcctgaattctttgtaccctttcctcttttattcatttctcatccttagactgacttggctttgtctttgtcactcttcttttagtactctagtgagcctatactatgctggggaggtattcttagtatgagttgggtcttctacagcttcgttgtctgtattcctcaggaaagaaaataaagcacctaagttctaaacttgacgcctcaagttaaagaacattgagaaagagagttcactatctagtgaaggtattagttatactttttaatgccattttaattccatttagtcaaagaatttctaagaaaaaatattttaggagatctggatttatatttatttgacagcgattgaccaaagtgtgtgagcgatgtgtacgcgcattttgaaacttattcagattaataaatgagctataatattrtttgattgtgaggccagaacccagcaactcctgtaattcttctttggtaccccttcctatattatgaaagtataaaggggaaaataatctgagtgaattaactacttttctttttactatgtggaaagagtaagataattctgtgttgctatagaaacaaaacacgaatcttttaaagttaaatttgtaactagttttagaaaaaaactgtcaacaaaatatttgcctcctccatgatttggcttcagattacctttccaactttcacttttcattatcccctttcatatgccgttttctctcttcttcacagacagcctgtttttccacctctgtgtctttacttgtgctatttcttctacctgggttgtraaatttttttatcatgcaacagtcaccaacttataacaaagcaagtccaatacaaataattaaattttcctgcttgaatcatttgaaaataagatgctaacctgatgctccatcaccctgcaaacayactctcctacataatcacagcacaagcaacatagtacaaccaacatattctcctacataatacaatacaagttagtatagtagtgttcatacattacaatagtctaattctagacccccattcagctttcaggagctgtctgactagtgtttctttatagcagaatgacctagttcagaattatgtgttgcatgtagttattatgtatctttagtctctttcagtctgcagtmatttctcaggttttctttgattatcgtgatcttgacacagcacattttttattagcctttctattagctaattcatattttatggatccatggtttccagtattaagcactgggttatagaatctgttactgacgttatttgttttgatgctcaaagtgtcttcggcttgaccattaggatcccttaaagctggcttttgtgtccttttggcattctccatcattctttaagcacttccttgctgcttggcacaagatgttgtaggcttatcttgtactttttctaccctggcccaggaattagccatatctctaagaagctctggttcttttgagtggagaatggtatttagtgctgggtatgctcattgcttttgagctatcacttctcccgggccttctcagtagatggagctactgaatatgtatatatatgtagatatccatacacacwtacasatrkgtgtacacttttaccaccatatttccatatctatttatgtatgttgaaaaccaagagtttatatctatactttaaattccaataaaaaaccatagggtggacctggcgtggtggctcatgcctataatcccagcaccttgggaggctgaggcaggtggatcgtctgaggtcaggatttcgccaccagcctgtccaacatggtgaaaccctgtctctgctaaaaatagaaaaattagatgggctttgtggtgggtgcctgtagtcccagctactcaggaggctgaggcaggagaatcgcttgaacctgggaggcggaggttgcagtgagcccagattgcaccattgcactcctgcctgggtgacaagagcgaaactccrtctcaagaaaracaacaacaacaaaaaccaccgcaggatgcattctagtttttctccattttgtgcttgtaattcccttttctgacaatgaaaagcctagctcaaattatccttagtacatgaatttattagattagtcaccctgtatgccaccaatctctcgttgccattgccaccccctcctctgygtgaatgggctccttatccctcgtgggctctgtcactctatgcaaagctgttctcatgtgcagatgccctcttgcctaactgaggctcagacaccctgctgtgggctaccagtggccctctcctttttcagtgtaggatccagtcctattgcattttgccatcatgccttttagttttctttaatcagaagtagttcctcagactttcattrtcatttatgacatwggcatttttgtaactataggtcagttttttataraatgttttttaattcggacgaataatttacttattaatttttaccttctccagtaacttttcttctctcttccagctgaggaatattctctcactgctractttctgtattaatttttgttgtttatatgtgtgccttatttaccctacaaagcatgaagcttctagaggacaagatgtatttcttattcatcttgtaaatctcattgcacttagcactgtatcttacaaatgcatgtaatacatccagtataatacattgrataaataactaaagcaataaaataatgtaatatttagcatacaacagttggttccattgtggtttttttttaaatatcattttgtaaaataagtcttccctaggggtaaataaggacttctagagtaatatttaaaatttttcctatggcatttttggggtgaccaccygtcatctaaattgtatatggaagcatgtaactcaggaaaatcccaagttaattttagaggattattcattcaaaaaaattacttaaaatctactatktatcagataaggttctgggccctaaaaatgtggtttttccctaagccttaaggattttaatccccttacgggatacacattcacaagattgaacattcccaagtcgtaaacttgcatatagtctgtccttaagttgctttggaaaaaccaaagagtataggggagtggttyttaaactgtggtcctaggaccagcagtgtcagcatcacttggaaacttgttagaaatacaaactcttggccragtacggtggctcacgtctataatcccagcaatttgagaggctgaggccggcagatcagttgaggccaggtgttcgacaccagcctggtcaatgtggtgaaaccccatgtctactaaaaatacaaaaattagccaggcatggtggtaggtgcctgtaatcccagctactcgggaggctgaggcatgagaatcaattgatcttgggaggcggaggttgtagtgagccaagatcatgycactgcactccagtctggtcaacagtgagactctgtcttcaaacaaacaaaaaaaaacaaattctcaggtcgcatccccaacctactctaataaaagactctggaggcaggaccccaaaatctgtgctttaacaatccttataatcataatgcatgctaaagataagagtacccagaatgaggacttttcaaccagagaataccactgtatcaggaatgagtcaaaaatgtgtcatgttactgatcccctcagtggcttgtagcctcaaaaagtcttcgtttaaccccattcctatgcaaatacgttttctggatgctattttgtgagaaaagttgggaatgctggtctagaaactactctgtttctccatgaagaacttctggggcagtagattttttttttaggtttatgccttcttactggaataggtttctacagtatctcagcagtattacctgttttttttttttctcttgttttttttggctttgyctttgttttttgggttttttataatttatggtagctaaagccatgaattacatctgtatattcaactggagacattcatatatcattttaactgccttttttatcttatagggagttcccattagacttgaagttgggccacgtgatatgaagagctgtcagtttgtagccgtcagacgagatactggagaaaagctgacagttgctgaaaatgaggcagagamtaaacttcaagctattttggaagacatccaggtcacccttttcacaaggtagtttcttaaaattgcttatgtctctctctccagatcttccaccacctttgagatctttaccaaggaatttttggggttgccccaattggaagcaattgttccctccctctgaacccccatgctacttaatttgccactctctgggttttttacttgtattayggttatttttctaagtgccacctgcttcctactaggtttgcaacaatgaagtttctgtcccctggactaatktgggttaatttaaatctaggcttttatgagatataaatgtgagggcttcaggcattgactgtcatctgctgggtacacattggcagcacctgggaagctttagtaaataccagtgccttcctagagatactaatttaattggactggagagggcctggaaactatactgttaaaagctcccccaggggattataatatagccaaggctgagaacctcctgactggggttgggaatgagggatagaggaaggccttagggccgccctcacctatggagagagtcatttagaatcatagatctcaaggtagtcaaggcagaggcaccagaagattagtggcttagcgtggcaccctgttttctttctctgcctacctggagcagaaagcagagaggaaagcccactaccactgaggatggaggtgcagtttgggagagggtaatgcctgcatcttatataagggcacttatatattgataaaagatatatatatattcctctgaatctggaaatatttaagaccagggaggtttaaaaaataacatagactcccataggtaatgtgttaatgccaggaaaagaatgatggtcattagagatttaacagcagtaacaaaagttatgatcacctgttgtgtgcttaacacatttcccatgcatttaaggctcacaatagtgcaatgataagrtaactctgatatactgayggtcactatgagtgatagacttgagattcaaattgagtccttctcactcccargttgtcttttcattaaattgtgcttatgtgtttcataaaactttgtcatatttgtgagaacaattatgtattgttttctaattttgtttggtagggcttctgaagaccttaagactcatatggttgtggctaatacaatggaagactttcagaagatactagattctggaaaggtcagagagtttggaaaacttttcagtataagaatatttmagtaaattgtattttaaggctcattgaatttatgcatggtattaatacctttttaagccaatcacataaaaagatagtacattactcaacatttatatrtacgtataaatatataatctaattatatagtctttgttttacatttatatgtcatataaatatataatctaaatatatagtctttgttttatatttatatatgtcatatataaatatagtgtgtgtgtatatrtatatatatatagtctttgttttctactggcttttctaaagcattacaacattataccattttgggggtaatacttgtgaactgattatgtaagtttttttttccccatgtttgatatgctactttctaaagaacattaattctgtatgtctccttwtttctttattgaaaatctgtgttatttcagtttctggtaagttcctaaagtaaccattgttctagctttagagctgtcatatgcggctgcctaaaacaaggtgaaaagtcagtttctttccattccctgactgtacatactcagctctcaattgattgaactttctgaataatgagaagaaaagtgttgcttattctaagcctgtttttcataatgaggggctacctggctccttagaactccataggctttcctaattaggtagttaatggctctttaagatttaattgattttatatattgggtatatgcagttgtttcgagctgaaactttaaagtttcataaagaagaatttcagatttgcaaagttatttaattattggaatgaatcacttatggactttagtattctggtatacatgtttgaatatacaaccaatcctgtgtcctcaggttacaagtgagaaaaccatgggccagtgtcttaaatgaataccccaaactatacagaatttagatcactcttctgactaggtttaatgcattttcctctgtatctttttttgtgttttaaattcatgctgagaatgagcatgaatttatgtaaagctttaatttttatggtcataacgtattaatatgtctcktatttcttgagctgggaaaattaatctctctggctttcattttactattctgtaaaatgagtacaaaatagataatatcaaaatcctctttagatctataattcttcagtrtttagccttctatccttattgggttattgcttttgtaatttttcacctttctggtttctgtagtttttcacttgactcaaacttcctgcttttttttttttttggtacagggtcttgctttgttgcccaggctggagtacagtgccgtgatctcggctcactgcaacctctgcctcccgagttcaagcgattctcctgcctcagccttccacgtggctgggattacaggcgcctgccatgacacgcagctaatttttgtatttttagkagagatggggttttgccattttggccaggctggtcttaaactctgacctcaggtgacccacctgccgtggcctcccaaagtgctgggattacaggcgtgagccactgcacctggccttaaacttcctacttttaatagaaggctagacagtgggtagccatctgtagcactgtgttttttctttcactttaatttacgattttctgtggctgagagcagttgatgagaagctgctgaagaagctggaagcatgttgctgttactgccaatgtctcttgggtctccaccttcatagatctctagattttcagctgctttacactgtatttctaatatgtggagattattcacaactttgctattcccctcattaactctccaggaatattttatagggctactrcataattgttattgaagacaaacctcattttgaagtagacatgctttaaaaattagcattcacaactggragaaattttaatacttgttggctgggcccggtggctcacacctgtaatcccagcactttgggaggccgaggtgggtggactgcttgaggccaggagtttgagaccagcctggccaacatggcgaaaccccgtctctactaaaattacacaaattagctgggcatggtggcacaygcctgtaattccagctacactaggaggctggggcacgagaattgcttgaacccaagaggcagaggttgcaatgagccaagatwgtgccactgtactccatcctgggtgacagagtaagactgtgtctcaaaaaaaaaatttttttttaatgcttgtctagtctgacatccacaatttattaaaagaaaacccagagctagagattttcaaacacatggcaaatttcaaaattaaaataaaatcctaagtatcttgattcggcctttgttttatgtagtctaagaatgaaaaattgaaaggtttttttttttttccttacacaaaatgattttaggactttaaaaatgatccacttacctatataacatgttaggaacattgtggcataaagtgaaatttgcgtgattgttaattgttgctgttaacaacacattaaaaatcagtttgctatttttgatgttccttttctcctcctgataactatttagataggtagagcaggtgtagtccaggtttgaaatgagggagatataactggagttcaacttcttttcagccactgtgttttagccagtttatgggagatttgagggtactgcaaagatgtctttgttgtgtcttgatgtgctgtgagcgtrggttttggatagtggamaaacattctttcctatcttttataactgagcaaagttcctartaggtttgcaaaggtatcatagcctgaaaaaaggttgggagacctatcctttttgcttgccagtttaatatagaactcaaatgttccttctgcagaatagaattgaaggagttataaatactgattacttttccttttcttaattagattgttcagattccattctgtggggaaattgactgtgaggactggatcaaaaagaccactgccaggtaaacctaattaactggcaaaacttttgaaaaattgcaatggaaaggaatagcaatttgcagcataaatgagtggaattcttatttgttattaatttcagggatcaagatcttgaacctggtgctccatccatgggagctaaaagcctttgcrtccccttcaaaccactctgtgaactgcagcctggagccaaatgtgtctgtggcaagaaccctgccaagtactacaccttatttggtcgcagctactgagggatgaacgaaagccccctcttcaactcctctcactttttaaagcattgataytagtatcttctcagatacagaccrttttatgattttttaaaaagtaaaagttctaaaatgaagtcacacarracaattattcttatgcctaagttaacagtggataaaagacttttctgtaaacaactccagtaataaatatcatgaactaatatggtttttgtattcatttgtttctgaaaaatgtgcattatgtactatgaggaaatttctacaaagagatgaagacaattgaaagccagmtatctgttattgatctaagcactcccaacatgtctcagaccctgaaccgccagttataccctacactgataggtctcgaagcactttctttccatagctcctaatacagaatctgaaattgtcctaaatctttctgtttaaaaaacaaagcaaacccacaaatggaaaaagcaacaataataaagatttcccttgaacttctgtctttctctagttagtatcaggtctttgaaataagggttacagtttctgtctgaaagagtgataagccctcctcccttctttaaactttctacttttcctcacccttctgccccyaccatagcactgttttcactgagatcatgaagggtactcctgagcaaagctcatgttgacttcttagtttcatgtcttaccatatcactccggtgcatttgatactttttaaaaaaaattattcctatgacctgccctcctacatctctgaccctttttagttccatgtctttcactgacttttcttcctgggtatgcgtctttgacattggtttactaaacttccatatttggccgtcttctcatgcctaatcagcctcatctaatcccacagtttcaaatagcattaataggctaatgactccaatatttttatctgtatgtctgagttctagatcttttccaactgcatactcaattctcttgagtgtcccatcagccattcaggtcaacatgtcccaaaaagctcatttcactctttaccgccagacctcctcctatagtatttcctgcccagaagattagcattgccaaaacgttcgtcataacccaaaccagaaaactgagagcccccctgggctgtccctccagcaccatcatccatattcactcggccagcaaaacatgttgctagtacctctaattcctcttgggtattccctttcaaaaacctgtggattgcctgcaggccttggtacctcttgtgctgattactgcaatggactccagtcatctccagtccagtccacgttttcacagtgttgtttttctttttcctaacagtttattaagaattttttcttccccttaacatccctttgtagttcaccatcacttaaaagataaaatttaaactagcccatctagtttccttttcaatccagcaaagtcctttgcaacctaaccatttggggtttcctggaaacaacgtggctatttcctgcctgtgccctttgctgggaaaatgcctttcctccctcatttctagtccacttggtcaatcttttaccaatatttccagtccacttggtaaatctcttccaaaatgcttttacacttggtagtgataaatacaccagtaaaggaaaatgcatcagaaaggacttgcatttaaaaaaaaaaaaaaaaaaaaaaaggacttgcattttgagctgtgctttgaaggatgagtacaatttcaataggtagaggaaggaggaaggacattccaggtagagggaacaagagatggaaaagaacaaaagcacacactgtatgagaaagcaagaactgttcttaacattggtaggaaattgtcagttgaaagcagactaaatagagcatgctttcaagactcacgtcttgaatatgtgcattcatatacctgttagtgaaattgatttcaatggactgaaatatatatagtcacatttttatactcagaatcataattttgtattcatttatggcagttcagaatgctttgccttctaagtgtctacataaactgcctaagttcagttataaaatggagaaaagtctaacagctatctcagttactctacctcatagaggaaggcagttaaaacaatgcccagcacataataaatagctgttgttggttatgaccattatgtagggtcaactggaagttgcttctaatatataatcctagttatagtagttactttagctgctaattgtttttctgcaaaccaacataaatgcttttaggggacaaggctttttttttttaaccagtccacgataaaagcccaaaaagtacattagagattattcacatttttccctgtagccactggccattttggaggaggtggccatctctggtgcaaagagaaatccttaatattacgttttgaaacttcagatgagtagcactaacgacagaaaagcttgaagtttgctgctttaaaggaagtcactatttaaagaaactctacattaagtacttttgttaagcagggaatcctttactcaaaatgtacctctggcacattggccttttttcataagttgaggttcagctaaagtatcaaaatattttcttgagtgtgcgcttttcaaaagagtacatgaacctgaatgaaatgaacacgattttatttacaggtgacagctgtaaactagatgtatgactgacagtttgtgattatgtgcttcatgtttattgtagccaaaagaaagcaggtcaaggcatatttactactactccgttcactggggcccgtgtactacaatacatcttagcaatttctagttcatccatgagagtgtgtttttcattatgccagtaaatcacatgaatccttaatgagaattggacaataacggttggcttgccagtgaagaggatttaagtcttgataatagcagcatcagaacattcatcaagcaagcaaggaggaaggcattttgaccggagagtggagagatcaccctatttacgtctgactctagttattaatattagttatctgccatataactgtggtgttcaggggttgccagtaccatcaaaaagttgggggaagtagctaccactaccctgttattttcaaacataactttggtcctttgcttgtcacttttactatgtctagaaagtgctagccatttaacaaatttgagtgcctgctctgtgcacagcgccagaggatacactagtgagtaaagcaaaacatgatttttctttttcttggctgtatgtccttgcagtagttctgtttgagatgccaaattaggcaatcactcagtggtggaaagtgagatggggcactgaaattgggttgagtgttgtcagtaagaggccatagtctgagtgaccctgactaagagggtcttatctaatcatgagattatccctgtcaccagtggcaacacactgagaactttgtagttgagataatgcctggaaaatcactctgccacaccatcaggcttcaaataacaggtagaaccatattcatcttgtggtcagtaggcaattttaaaccaatgtctttgttcaattttactggaaaatgtatgagtttggaacatcaaaagtactgaaatgatataaaatattttattaatatttaaaaagcatcatgtaataaggatatttcaaaatacatttgaagtatgtcaccaaaaccaaattttgtgatgaaatatctgttgatgaggaggttgagggatacaagagctggtgatgatgataatatcagtattactttatatgtgggtaaatatgtaattgtaccatatttccttcattcattctctcactcttctagacaattatttcatacccttctctcctcaaatacgaatgcttcctttttttgactttcagttgatcatcttgatttctctttcactgagatgacagaggcaataaagatagaacgtttgggacctcccaccacatctacccacctactcatgtccatgcatttcactttctctgctgtttcaggtgaactgtctgttctcagagtggatgccaacccctccacgtgtgcactaaatctcatcccctcttgccttctcagtcgtggcacatcagcaattctcccctatgtatcatcaggttttctttctctcctggttctttccatcagcttacaaacatgctgttatttttcccaacctaaaaataccctttcttgactccacatccctttcggtgtagagcaaaactcattgaaaggattatccacacttgccagctccaatttctcttctccattctcttgagcccctgtctcatttaccctcagcacttccctgaaaccactcttgtgaagatcacccatggcctccataaggtgcaatcccatcggcatttccagccctcattttgcttgccctcgtagcacttgactcagctgattctccctcctctttgaaacacattcttccttggccttcaaaacactatactcttctatttttccttttatctctctagtccttccttctcacctcttcatattttcttctcttcatattttcttggtggcctcatccagtctcatggcttttaatgttataaattatcaactcttgagttcaccctcccctgaactccagggtcattcaactcccaactagcttccaacttggatatctaataaataccccaaacttaacatcatttccacccctcgccccatgctgctcctacaacagtcaacttcgtcttaccttcatctcagttgcaatatcactcttccaggtcaaaactctagtgccatctttgtttttgttgttgttttggagacagagtcttactccgttgccgccaggctggagtgcagtggtgtgatctcggctcactgcaacctccatcttccgaattcaattgattcttgtgcctcagcctcccgagtagctgggactacaggggtacaaccatgcccggctaatttttccattttttgtagagataggggtttcaccatgttgcccaggctggtctcgaactcctgggttcaagtgatccatccacctcgacctcccaaagtgctgagattacaggcatgagctaccgtgcccagcccctagtgctgtcttgactattgcctctctcctaccttacgtttaattactcagcacatgctgttgactttaatttcaaaatctcctggataccagccagcttcatgtgtgtgcgacctgagcagttgcaccgggctctgtgcttggtttagtgctctgctgttgctgtcttgaaattattaataatttaaaaaaactggagtgtggtaaaatacatataacataacatttactatcgtaaccatttttaagtgtacagttcagtagtgttaagtatatccacatagttgtgcacccagtctcatctttttttatccttgcaaaaccaaaactctgtagccactaaacaactgccccatgtcaccttcccttcagcccctggcaaccatcattctcccttccatttttgtgaatttgaacttgactgtagatacctcatataagtgggctcatacaacattcatctttttgtggctggtttattccacctagcaaacgtcctcaaggtttatctatgttttagcatgtattggaattttcttccttttaaggtggaataatatgtgcttgtatgtatgtagaccccattaaaaaaattcatctgttgatggacacttggattgcttctgctttttggctattgtgaatgatgctatgaacatggggtgtacatacctcttcagggccctgctgtcaaatcttttcaagtttctatacccagaagtggaattgctggatcatatggcaattctatttttaagttttaaagaattgctatattgttttccatagtggttgcaccattttatttattatttatttatttattttaagagaaaccactcagactgcatgcatcctctccctcttactctctcagaggaagagaagaacaatcatcaatggcaaatagcagttgcagtgaagcaaygccaagaaccaacttcacgctcaggagagaatactgaacctcctccttgtggattccagggctgcgccatttaaaaactcttcttcttccttttctttgcggggtggggggataaagtctttctctgtcacccaggctggagtttactggcacaatcatagctcactgcagcctcaaacttttgggctcaagcaatcctcccatctacttgtctcccaagtaactgggacaacagggagtgtgccaccatgcctggctaatttaaaaaatttttttgtagatgcagactcttgctatgttgcccaggctgatcttgaattctgggcctcaagcaatcttcccactttggcctcccaaaatgttggggttacagatgcacaccatcacgcctggcttaaaaattcttgataattggctgggcatggtggcttacacctgtagtcgcagcactttgagaggccaagg

SEQ ID NO: 95281 - DNA, 69137 bp, Homo sapiens
  misc_feature (1)...(69137): n = A,T,C or G
aacttccgacctcatggcctgcctaagcctcccaaagtgctaggattacaggcgtgagccaccgcgccgggccatgattgtttatttttaagattggcatagaaaagaaaatttggcagggcacggtggctcacacctgtaatcccagcactttgggaggccaaggcaggtgaatcacctgaagttaggagttcaagactagcctggccaacatggtgaaaccccatctctactaaaaatacaaaaattaaccaggcatagtaatacaaaaattactcaggaggctgaggcaggaaaattgcttgaacataggaggcagaggttgtggtgagccgagatcgcgccactgcagtccagcctgggcgacagagactccgactcaaaaaaaaaaaaaaaaaaaaaaattgtcgctgaatgcagtggctcacacccgtaatcctagaactttttgggaggccaaggctggtgtattgcttgagctcaggagttcgagaccagcctgggcaacatggcaaaacctcgtctctacaaaaaaatgcaaaaattagatggtgtggtggcacatgcctgtagtcccagctgctcgggaggctgaggtgggagaatcaccagaccctgggaggtcaaggttgcagtgagacataatggcaccactgtactccagcctgggggacagagctagaacctgtcttaaaaaaaaaaaaaaaagaaagaaagaaaggctgggcgcggtggctcacgcctgtaatcccagcactttgggaggccgagacgggcagatcacgaggtcaggagatcgaaaccatcctgactaacacggtgaaaccccgtctctactaaaaatacaaaaaaaattagccaggcttggtggtgggcgcctgtagtcccagctactcgggaggctgaggcaggagaatggcgtgaacctgggaggtggagcttgcagtgagccgagattgcaccactgcactcaagcctgggcgacagagcgagactccgtctcgaaaaaaaaaaaaaaaaaaaaaaaagaaggaggaggaaggaggaggaagaagaagaagaaaaaagaagaaagaagaagagtttgtcctttgtccagtttgcaagggtgtgagggaacatgttcctgagcattgttggcaaagcggtgaaccctcttaggagagttttgagaaccttaataaaagtataaagtacgtatcttttgaaccaacaattatatttacagagaaatccaaataaatcacgcaaacctataaatatgtagaaatggcagttggaagaatatttgctgtttaaagaaatttaattttaggtaccaagcagtttctaaatttgggtgcatcaacaaactcaatgtctaggtttgtcttgtttctacagtatatggctataaaaaccttccggatcacgaaaataaaagcacagataaacaattaaaatatcgacactcaagagtccaagtcggaagttagaatatctggagaagcaatctgattcacataaacctttttcgttttatttttttaacataaatcctatctacctggctcttgccctgaccggccggagagaaacggtgacaaacctggaacaacgttggaccaaagacacttcaggaggagcaaaagcgcgttatcgtagacccaggtccctcgttgtgtccagtaccgagctttggcactgtcaataagtcttttgagaaggatggcatccctacctcagctactgagcatgcgggaaactgcgcgcaagcgcacaacagcgatttcacactgcctctttagactcctgatccgcgggaaaattccacttgtccgtgttttctccaagctctccgtaggtgcaagtcacctgttgcattaaataaaagcgaaagatgtgtcaactttcaaagattggctaaaaaaagaaaaagaagaaggaaagaacacattaagccagcaacagtgtgttgaaacaaaaaaaagattggttttggtttcagctgtcttccagcccacttcgtagagttcactgttttaaaatgttctttgtattagtgataccactctgcggctatttaacttcgaacccctagcggtccgtggacaggcttcagcaggtccaccacacacacctccacctcccactccccacgcaataacacagcaactttatgcagaattgtgtcaaagatgcttgcttacctttttttttttttttttttttttttttttaagcgatagatagcttgctctgtcgcccagagtcgattacggctcactgctgccttcccacttctaggctcaagccatcctcccgcctcagccttccgtgtagctgggactactggtggaggtgcgcgccaccacacccagctaattaaaatattttttgtgtacagatgggatcttttactggggggcgtggttggggaagggggcagtgtctcatcctgtcgcccaggctggagtgcagtggcgcagtctaggttcactacaacctcctcctcctgggttcaagcgatccttcctccttagcctcccaagtagctaggactacaggcgcgccaccacgccgggctaattttgtttgttttttaagtagagacggggtttcatcatattggccaggctggtcttgaactcctgaccccaggtgatctgctcacctcggcctcccaaagtgctgggattacaggtgtgagccactgcgcccagcttaaaaaggcttttacgtcttcatttgattttcacaataactctgtgagttaagtagaccctttttgggaagtggaaaaatatacataacttaaattatattactttaaccatatatatatatatatatatatatatatatatatatatacacacacacacacacacacatatatacatatatatattttttgagacggcgtcttactctgtcgcccaggctggagtgcaatggcttgatctcggctcactgcaacctctgcctcccagggttcaagctattctcctgcttcagcctcctgagtaactgggactacaggcgcacaccacccagcccagctagtttttgcattttttttttttttagtaaagacggggtttcaccatgttggccaggctggtctcgaactcctgacctcatgatccgcccgcctcggcctcccaaagtgctgagattacaggcatgagccactgcacctggccatactttggtttttataattaaattgtataattacatgacaagtacaaatggcttaaataaagacaaacataatgcaaggtaagctcaacaagtgagaatagaaatctgcagtcatcctaaagagtagccatctcccaagtgttcattgtatcctctcataggttttacgagaaaacggcatagttgaattcagcaagttatgtagaggttggttaggagagtttctatgtaaatatatctttgtgctcctggaagactatagctgtgatagatcccagatgtgaaacygtgggtcaaagatgaagtgcattttattttattttttggagatggagtctcgctctgtcgcccaggctggtgtgcagtggcctgatttctcactgcaacctgtgcctcctgagttcaagcgattcttctgcctcagcctccagagtagctgggattacaggcgcctgccaccactcccggctaattttttgtatttttagtagagacgggatttcaccatgttggccaggttggccaggctggtctcgaactcctgaactcaggtgatccacttgcctcagcctcccaaagtgctgtggttacaggcgtgagccaccgcgcccagctgaagcgcattttaaatggtgatggatattgctaaattgccattcggaaatctcctgcctcagcttcccaagtagctgggactacaagcatgcgccatcacacccggctaattttgtatttttagtagagatggggtttctccatgttggtcaggctggtcttgaactcccgacctctggtgatccacccaccttggcctcccgaagtgctgggattataggcatgagccaccgcacctggccgacagtacctatttaacactaccatcagcagtccactttcacacattctcccaagccctgttatcaaacttctttatttttgctttaatctgctggaaagaaaatggtattttaactgtctattcccatgactcctaaagttgaggatctttttatgtttattagctgtttccacttctgtgtctctgagttgactgttcatttcttttgctttattattattattttgagacaggctctcactgtgttgcccaggcaggagtgtagtggtgtaatcatggcccacttgcagccttgacttcctgggctaaagcgatcctcccaccacagcctccaaagcagctgggaccacaagcacatgccactacatccagctaattttaaaaattatttcagagataggggtctccctatgttgcccagggttgtctcaaactcctgggctcaagtgatatttccacttcagcctcctaaggtgctgggattataggcatgagctactgtgtccagcttcttttatccttttttttttttaaattgggttgtttacatttgtttttttgatctgtagcagctctttatgcattttgtgtattattattttttaatgtgtagcaaatgttttcttccacagtatagtgtaggaaagacaacataacatggtggctatgcacacacactggaatctaactgcctgggtttgaattccagctgtgctacttagttgtatcatcttgagcaagttacataattctatgtgcctcagtttccttagctgtgaaatggaaatactcatagttcctatctcacaggtttttttggtatgctgtgtcttcacctcatctggttttgaagattaagtgaattaattcaggtacagagctggagtcattgattggtgaaaggctgacattgagtgctttctgtttgtcacttggtttctcactttccggtatctttttttggtatatatatgttttcatacttgtagaaaatctgtccttcttatttatgtgaaccaaatgttctggatgttgtgttttatgattaggaaggctattcccaagttgtatactcaacaatgaaatggtaacaattgtgaactattatgaactggacaaccaaatagagcagaatctgtcagaaacaggagcagaagttgctatatataccatactattctatgagtgggatataacagggatttcagagaatcttaaaaaaaggttagattgttttataatattgttaaaatctatgggaagtcattgatttggactgagctcctgcactaggctgtttacttgtaaggtctgcgttccaggaaatcaggagagatgatagccaaatccattaagccaaatggcgtctgcttttcgttccctgtttctgccttcttcaaccttttctgcctataaacctcaccctgcccccacagctcatcagagatcctttctattttgtagaaaggtttaggaatatttaataatagccaattagatctttaaaactcgatttgctgaaattttattattttacaatattttcactgaacttgtgctgcccacagtcgtagtcattacccaagtgtgcctgttgaggccttgccatgagtttagcccagattgagatgtgcagtatgtgcaaagtacatgtcaaatttcaaaggcttcgtatgaagagaatatgtaaaatatcttactttttattggctacatgttaaagtgatacaatcatagctatgttgtgttaaagtaaaaaaaaaaaaaatatatatatatatatttaaaaagcagggcacagcgattggactatgagccccacctttccccgcccccgtgaatctgagcccgccccccggcggctgcagggaggacccggaggtggctcagcctccgcggactccgggaaggcggtgcccaccgccccgcccccactacccgccgctccctccccgccccttccgctcccggagcgcgtgcgccctcttactcggctccccttggtttcctggggtcctgccccttcaagctggggcgggagcggaggaccccgctctcaggggttgccggaccatgcgttgggggctgcgccctcgcgggccgggcgcggccgycctggccactgcccgaagtttgtgggggacgccccgccttccctgcagcccgggatggcaaggggcgacgaagaggcttctggtgcggtcggtctccggggccagtaaccaccagccgaactcgaatagtggcagataccgggacacggtgctgctgccgcagacgagcttccccatgaagctgctgggccgccagcagccggacacggagctggagatccagcaggtacgggccccgcctcggcgcggggcctccagagaggcccgatccggccgcgggcaccgggcgctcgcaggcgccacacctctaggctccacgccggtgcgggtgggcgggggtgtgaccagattggtggaattcgtctgcttcgcacagattttgtgggctgaaaacctaagtgaagaaatctctagatgagcccctcctttgtaccaggttctggagcgggacattaaggggtcactagcgatgcccagttaccagcatgtatcgcacgtatgtcccatgtctaccgtaggcaaaacagatagactttgggcacttttccaatgccttgtaaaaagtaaattcacatgtccacatgtaaataaaaacccaggctgggcgcagtggctcacgcctgtaatcccagaactttgaaaggccaaggcgggagaatcgcttgagccaagagttcgagaccatattggctagtcacccccacccccccgtccttaaaaaaaaccttaaaaacctcaattatgatgaatgaaggggaagttgaagcccacttcttggatcttttagatccctagttggaattatgactcgtttgaagtcgcccaggctggagtgcaatggcgcgatctcagctcactacaacttccgcctcccaggctcaggcaattctcctgccttagcctccccagttgctgggattacaggtgcgcaccaccacgcccggctaatttttatatttttagtagagatggagtttcaccatgttggccagggtggtctctaactcctgacctcaagtgatcttcccgcctcggcctcccaaagtgctgggattacaggcctgagccactacgcccagcctagtctgaactttctaagagcagagattcctctttagcttctgtaattctagtctttaaaaatccctgatattcttggaatattggttaagtaaatatacttagcctaaatattctgacagttataagagttcatctaattttttaaaggttttttagtcaataccttctgtatgccagaaagagtgacagtttcaaatgtttcctcgtttaatcttcacaccagccctgtaagatggatattaacacttttttttttcagataagaaagcaggcccgtaagtgcacagtaacctggacaaaatcatacagcaagtgagggaagggaagtgacttagactgccatgcatgttgttcccagatttggggaatggcaagcattgccgccaaagaatagcaagaatatgtgtgtcgggaatctgcaggtccttcaacatgtcgggggtgaggagtgaagcatggggagtgatgaaagaatgcccgagaacttagtggcactaaacctttgtagggtgctgcatatcatataaagagtttagacttcaatctgaggtgtatggggacattactgaaagattttaagagatgcgtactttgacacgcatttcagaaacctcaccttgtatttcagagttgagtagattggaatggaatagattggaatgtaattggaatggaaataagcaagtgttggctgttatttatggttagactcaggagtatgtatttatatgatgtttagatatcttttttttttttwaaacagaaatgtggattttcagaactttattcatggcaaagagaaagaaaagtaaagacagaattttgccttcatgatggacctccttatgcaaacggtgaccctcatgttggacatgctttaaataaggtaactataatttaggttatgacacttgaaagaaagtgtttatgtaaatactctttataaatgtgtattctaattatatgataattatgtaaatttagatttgcacataaaactaaaacattttcatagaaagcaatatacaattttagtactgcataaaaaaaattgctgctatttgctttgagcttaacgttatattagtaaacatcatcttattcagtgcataattatcgggcgaggcattgttctagaatctgggaatagcagtggacaaaaaaaaggtatgtcttggccgggcagtatggctcatgcctgtaatcagtgcttggcccacagatatcaataattcattatttttaaaatgcttagtagaatttcattgagagaatatgttaatactacaatctgttcactcatttttcagttctttattttttgtagatttcagtggaaattttggggaggaagtgggcttaggcatctgtagtttcaaaaccaggaatttggtcactgaatgggtcaatagtgctattaaagagaccaggcgcagtggctcacgcctgtaatcccagccctttgggaggccgaggcaagcggatcacgaggtcaggagatcgagaccatcctggctaacacggtgaaaccccgtctctactaaaaatacaaaaaattagccacgcatggtggcgggagcctatagtcccagctactcgggaggctgaggcaggagaatgccgtgaacccgggaggcggagcttgcagtgagccgagatcgcgccactgcactccagcctgggcaacagagcaagattccgtctcaaaaaaaaaaaaaaatcatgttttgtgatataaatacagaataaaactctattatttcaaacccttttgcaaggaatggaagagccaacattaactggattaagcaaagagagagaatttactggcttttttactgtagagtccagatagttttagccacctgcatagctggatcaggaattcacataaaattaagaattggtttctgtctctcactctttgctactttagtgactgccccaccccagacccccagcacatttcccagtagtttcaggcttacataattccaccttctctttcccaacagttcttttttcttttttttttttttttgagacagagtcttgtactgtcgcccggactggagtgcagtggtgcaatcttggctcactgcaatctccgcttcccgggttcaagcgattctcctgcctcagcctcccaagtagatgggactacaggcgcctgccaccacgcccggctaattttttgtatttttagtagagagggggtttcactgtgttagccaggatggtctcgatctcctgacctcgtgatctgcccgcctctgcctcccaaagtgctgggattacaggcgtgagccaccacgtctggcccccaataattcttataaaagtcctggaattgaatctcattggcctgatttgggtcgcacatctatttctgaatcagtcattgcagacttggggatagaatatgttaatggctacagtggatcacgtgttcactcttggagctgcagcagagggagccagctccatgtggattgaggacaaaggaataattccataaaaaacagtggcatcttttgttgttgttgttctttgagacagagtctcacgctgtcacccaggctggagtgcagtggcgcagtctcggctcactgcaagctccgtctcccgggttcacgccattctcctgcctcagtctcccgagtagctgggaccacaggtgcctgccaccatgcccagctaattttttgtattattagtattattttttagtagagacgtggtttcaccatgttagccaggatggtctccatctcctgacctcatgatccacccgcctcggcctcccaaagtgctgggattacaggcgtgagccactgcacccggccaaaacagtggcatcttacaaaactatctctcacatgaagagaaaccttcttgaagcccttagcaaagagcatgggcactttggaactagggaaggaccaattcttgctcttcctcacacatgctaattatagtcttgcttgctttctcctcttcctagaatgcatcaccagaatattcacatggatcacctcctcatttctttcagattctgttcaaatgtcatcttaccaggctctcttgacttccctctaaaatggtaccacccccagcccctaaatgtcattttctaaccctataatttgcttttttctccatagtgtgtgatatgttggtatatattctgtgttcctccatgagaaaaaagaccttgtcgtttttgtttactactatattctaggttcctagaaaaattcttgacatacagtaggcattcagatatttatccctcaaacaaagcaatgcatgaatattagaaaaatgaaaggaacagagataaatgactcttaaaagtatggaggaactttttttggggagaaggagggtggtgtttgatactgaggagttagtaaaatattcctatgatattgctactattcttttcactagaggcttcatatattatattttattattacatttaagaatccttattaggtacactgttaattattagttccagtgattgatttcatcctgttcatatgactgaaagcaacactattcagtagaaatacaatgcaagcggctgggcgtggtgggtctggcctgtaatcccagcactttgggaggctgaggcgggcagatcatcaggtcaggagttcgagaccagcctgaccaacatggtaaaaccccctctctactgaaaatacaaaaaaattagctgggcatggtggcatgtgcctgtaatccagctacttaggaggctgaggcaggagaatcacttgaacctgggaggcagaggttgcagtgagccgagattgtaccactgttctccagcttgggcgacagagcgagactccgtctcaaaaaaaaaaaaaaaaaaaagaaataaatataatgcaagctataaatttgtgccacataggtaagttaaaatttttctagtggccccagaaaataatgaaargaaacaagtgaaattaattttaatattacatttaactcaacatatctaaagtmtcatttcaacatacagtcgatgtaaaacatttttgagatatatcacattttcgtaaaacatgtttgaaatcaggtatatattttataatttacattacatctgaattcggactagcaccaaaaatcacatgtggccagtggctactatataagataccattgtttagagcatatatgcatccatgtattcatgtatttgataaatatttatagactagtgccagaaaccattcgaaaggctggaattcataggtgaagaggacagatgggctctctgatttcatggagtttatgttttacagggaagagacaaaaaaataagtaaacaatttccaaagagttaagtagaaaggaggttatttatatgatgattgatttaaataatatacccagagtaaagtgaaccaatcttaagtatgtatagctagatgaattttttttaatgtgacaaccactcagatcacaaggctccttcctgttcattagtaaacagtttgaaattagagtttttaaaggggggaagggatgggaggagaatataataatatcttttctacttttgataggcatggaaaggaggaaattgttttctggactactgggctagtggtcagagcactgtttcctcttgggaagaaggaaattgagcttggagccaaatctatcctttgcctttgattcctccattcaactatagtaatatattttttaaaaggctctgctgccctctggtatctaaaatgaatttaaaaaggtaaattggttctagaactatacctaatgaagaggtctactgttttagtaagggtttgtcaatgacagagttaaccacaatattccattctctgagtacackgtaagttctgcaatggtttgatgatatttcttagctcaatataaataatattagactatttgtgtcaatagtttttttatgagttaatttatacgtttcctttcaaattgcagttttaaaaatggtattaagtttaaaaaaaagaacataaattgtaggccaaatattttatgtatgaatgctaattatcattttatctttgcagattttgaaatacatggccaaatattttatgtatgaatgataattatcattttatctttgcagattttgaaagacatagccaatcgattccatatgatgaatggctccaaaatacattttgtgcccggctgggattgtcatgggttgcccattgaaataaaagtattatcagaacttggtagagaagctcagaatctttcagctatggaaattagaaagaaaggtaaataatctgtatttctgttttaaaatgatatttgtaaacactcaggtccttgaaatagtcagaactttaccaaaggaaccttttgtttgggtttcgtttgcttataataagatctattggaaacgcctttctgtcacagaaaattcagattttatttcattgatttttgtaagaacttatgtttggatattgaaggaaagactttgtgagcatttctgattgcattctcagtttcttaatgttcatattttaaaaaactattttttggtaaattcttttttctgctttcctcaagggggcttgttgactgattttaggtgttaagccaaaattcaattctaaaatacatatattttacattaatcttttatttgatcctttttcttcagtcgactgggccaagggaggattctctttttcttatatgttatactattgtacatttggatgtaactgtgaagatttttttacttccttgtgaaacctattatcattggcttagatttgatattctgattaattttttgtgtataatgaaatgaaaattgttatctgaccttttcttaaattaagaaacaataaggaataatttttccagtttatttgtcctaaatatgaggtcattgtataaagtctggaaaatacagaagacagtaataaaattttaacttttgcaattccagttaattttagaatttgttgtaggtatcttctgaacactgttgaccttcaaattatttttctattaaaaaatttttataggctgggcacagtggctcatgcctgtaatcctagcactttgggaggctgagggaggtggatcgatcacctaaggtcaggagtttgagaccagcctggccaacatggcaaaaccccgtatctactaaaaataccaaataattagccaggtatggtggctcacgcctgtagtcccagatacttgggaggctgaggcacgagaattgcttgaacctgtgtggcagaggttacagtgagctgagatccgccactgcatgccaacctgggcaacagagcaagactccatctcaaaaaaaaaaaattttgtgctcgggcgccgtggctcacgcctgtaatcccagcactttgggaggctgaggcgggtagatcacgaggtcaggagatccagaccatcctggctgacacagtgaaaccccgtctctactaaaactacaaaaaaattagccgggcgtggtggcgggcgcctgtagtcccagctactcaggaggctgaggcaggagaatggcgtgaacccgggaggcagaggcttgcagtgagccgagatcatgccactcgcgccactgcactctagcctgggtgacagcgagactgtgtctcaaaaaaaatttgcattctaaactgtctrtagcatttgcatttagagagatacatgctaaaccatgtttaagaattcgaattcattggttttttaaaatctttttttcgtcttttttttagctagatcatttgctaaagcagccattgagaaacagaaatcagcatttattcgttggggaataatggcagattggaataattgctactatacatttgatgggaagtatgaagccaaacagttgagaactttttaccaaatgtatgataaggtaaagaagtattttttctctttgagtaggttttagtatgcgttacaagattctacttttaacatcatatttttgtcttttatagggcttggtttatcgatcttacaaacctgtgttttggtctccgtcatctaggtatatatgcatttttcggtaattaaaagggagaaatttgtgaggcttccaagtatttatgtttaatatttttaacccttaggactgcattggctgaagcagaacttgaatataatcctgagcatgtcagtcgttcaatatatgtaaaatttcctctcttaaagccttctccaaaattggcatctcttataggtaagatttattcatagcttgagtgtaccaaagttatagaattatcccatttgctaacatatttacaattgtattttcacagatggttcatctcctgttagtattttggtctggaccacacaaccttggacgattccagccaatgaagctgtttgctatatgcctgaatcaaagtgggtatattattgcattttttgttttatacacaaatagaatgtattccattattaacattattttgaatttattttatcctgtttattattgtaaaatttaatgaattataacttagttattatgttcatatagattttattaacctttaggtgatcctttttatgaccttatccagcttttcgggaaaatgaaatagaagtataagttacraagtgttttgaaaatartacagtttgatcttgaagtcagttttttcttttttctttttttttttggagaccgagttttgccttttgttgcccaggctggagtacagtggcatgatcttggctcaccacaacctccacctcccgggttcaagcaattttcctgcctcagcctcccgagtagctgggattatgggattacaggcatgcgccaccacgccaggctaattttgtatttttagtagagatggggtttctctatgttggtgaggctggttgcaaactcccaacctcaggtgatccacctgccttggcctcccaaagtgctgggattatagacatgagccaccgcgctggcctgaagtcagttttttctaaaatgattatttaaaaattaaaatgatatctgtggcttttcttgtttcattattagtaatttctcctaaaattttatgttaggtatgctgttgtgaaatgttctaagtctggagacctctacgtactggcggcagataaagtagcatctgttgcttctactttggaaacaacatttgagactatttcaacactttcaggtgaagatttttagatatctgacaacatagtcatcaaagtattgggctgacttgaatttactactttgctgaactgcatattttgaattgaaacagatatggcctctacctttctagaatacattttacattgattacactaaaggagaatatacattaagcatgataggagtatagaaaaatatgaatattgataaatgtacaacaggtaaaactaatttctggcaatatccagtagttacttggtaaaattttatgcaaaattaatttttaaaattgtttttatctgttttaataaaagtagcaagaaaggaaatgcatatacttatttttcgatacataattttaataaaggattgaataagttctgaaaattattcagaaagcagttcttctatcaaaggaattttattttattttattttttaaagagacagggtctcatgctgttgcccactgctggaatgcagtggtccagtcagctcattgcagcctcaaactcccgggctcaagcaatcctcctgccctggccacccaagtagctgggactataggcacatgccactgcacccggctaattttgaaaaaatattttacagagatgaattcttgttgtgtagcccagactggtctggaattcctgggctcaagtgatctgcctgccttggcctgccaaagtgctgggattaaaggcgtaagccactgtgcctagcccaaaataattctttgtgagctataatttgggacttttgaggtagtgactgctttgaaatataattatggaagtctagggaagtttaaaattagctttttgttgttgttgttcttcattttgttttgagacgtggtcttgctctgttgcccaggctggrgtgcagtggtgccatcttggctcactgcagcctctggatcctaggctcaagtgatcttcctgcctcagcctcttgagtagctgggactacaagtgtgtgccaccatgctggactaatttttaatttttttggtagagatgaggtcttgctacattgcccaggctggtcttgaactcctggcctcaagtgatcctcctgctttggtcttccaaagtgctgggattatgggcatgagccactgtgcctggactaaaattctattttattttattttatttttaaagagatgaggtctcactatgttgcccaggcagatcttgaactcctgagctcaagtgttcctcctgcctctgcctcccaaagtggtaggattatagacgtgagccaccatgcctgggctaaaattatctttgatccttaggtatgatatatcttttaatttcttgctaaaaaatctatcacatgaataaagatacaaaaactgcctagaaagactgcctagctaaataggaaagccctctaaattaatcagttcagatacaagccaatgagaagtttaaacaaccttaacaaaaataaaaagatttttatgtcagaggcaggaaaggagcttaagaattttgaagaccatttggtcctctttggtgcaatagggtaataaaaataaaaaccaagataataatttacttcacaccctctctcactgtgttgcccaggcttgtttcaaactcctgggctcaagcaatcttcctgccacagcctcccaaagtgctgcaattacagacatgagctactgcacccagccccctgctcttttataaatgcagaggatattaaagacttcattgtcaagttatacattatcatagaagctaaaaatcacaagatttttgaaagtgttaaggttgaatttaaagatcttttgtctagatagcataattgtttcaaattcttactatcagataattattgagttgctatttgagtcaccatattgtggaggagtatatatattatccctgtcaaaataagctggtgtcacgtagctactacttattaaagtagtaggaatgttgaagagctaaaaatgaagtaatttgtatggggtaggttttctttccggaaaaaaatgaattatttcttatcaattacttagagatcattttgggagggtggtgagggagaatattaagtggtagatgcagtaagtatcaaaacacttaaactacattaactctgtttattctcacagaaaccctctgaggtgggaaccataattatctgcattttatagattatagaaggtcacagaacaagttaaaggggaagctggaatttaagcctagccagtattgttctagattctgcacatttaacctgatactctattgctaagcttaaggagatagatttgccatataaaatgattcttaatagtggttttctttccccacaggtgtagatttggaaaatggtacttgcagtcatccattaattcctgataaagcctctcctcttttacctgcaaatcatgtgaccatggcaaaaggaacgggattggttcacacagccccagctcatggtatggaagactacggtgtagcgtctcagcacaacctgcccatggtactgttcctcttttatcatttttaattattcatcttaataaaaggaaatgataaattctaaccaacatcttcattttttaaaaatgatgacttttgtcatcataattgtgaaatgctcaggtttgtgtagtactctaaagtttcattaattcgtactaattgaaaaagatttcccagaattaatagaaaattagcactttagaattgaagaatatatatcatggggcacttttaaaatactttttttctagtatcaagtcacatagacaaattacttttattccctgaaaaagcctgtttgttttagctaaacagtcctttctacatttactttacatacttcagttacttagcaagtatttccgtttagttaaaaggtgagtcagaaagggaacaactgtgtatataggcatagatttggaaacaatagagaccactcaaagatgttttaatatattttgttacttttgttattaaagtttatggatatgcttcaataacacattttggctttggtgatttaaatgtataaaattcacaaattcctatttccttttcttttcttttctttttttttttttttgagagggagtcttgctctgtcgcccaggctggagtgcagtggtgtggtatgatctcggctcactgcaacctctacctccagggttcaagcgattctcctgcctcagcctcccgagtagctgggactacaggtgcacaccaccatgcctggctaatttttgtatttttagtggaagtgggtttcaccatgttggccaggctagtctcaaattcctgacctcaagtgatctgcccacctcgacctcccaaagtgctgggattataggcctgagtgccgcgcccggccaagtacctagaatttcaatgtagaaaaagaccaggctatactgagatgtttttatatatattgttttgccagatattgtcataagagaaaatgtcttgatattttaattgttcaaaatgatactttataggattgtctagtggacgaagatggagttttcacagatgttgcaggtcctgaacttcaaaacaaggctgtccttgaagagggaactgatgtgggtgagcatcatatctgttgatatcatacatgttttctgaaaagtaggtagcagtaacctttgctacctattttccctccttatactttaacagaaacaaaaaaataaattatgtcttgttttgccatatgttttaaaatggagtttgggactttttcatcttttgctttgaagctgctttatttaagcaagtcagggcagtcaacagggagtgaagttattttagggctatggagataataatcagcagtattacttttgtggaaggatacaatcaagatcagggctggatgttgactgtaaattacacattccctactcactttttaacccttgtaaataactgacctatatggcatgatttatgtattagaatcttgggaatcctccagccttgaattgtctttctgtcttcctttacagattcagagaccaagtgctatgaaaacctttctttgcccacactaagactaaggctatttagacctgatatattacttttctagggctactgtaaaaaatcaccgtaaacttggtagtttgaaacaacagaaatttattctctcaagtgctggaagctagaagtctaaattcatcgtactggcaggaccatgttttcctgaaggttttatgggagaatccttacttgcctctttctagcttttggtggctcctggaaatccttggcattccttggtttataactgcgttactccactctctgcctgtcttgtcacatggccttctttagatcttacttgttttttcgagacaatctcactttctcactcaggttgatgtgcagtggcatgctttcagctcactgccacctctgtgtcctgggttcaagtgattcttgtgccttagcctcctgagcagatgggattacaggcatacaccaccacacccagctaatttttttttttttgagacacagtctcactctgttgcccaggctggagtgcagtggtgtgatctcagctcactgcaacctctgcctcctgggttcaagcaattctcttgcctcagcctcccaagtagctgggattacaggatacacaccactactcctggctaatttttgtatttttagtagagatggggtttcaccatgttggccaggctggtcttgaactcctgacctcaggtgatctgcccaccttagcctcccaaagtgctggaattacaggcgtgagccctcactgtgtcaggccataatttttttattttttattttatttttattttttttttaagacggagtctcgctctgttgcccaggctggagtacagtggcacgatcttggctcactgcaagctctgcctcctgggttcatgggttctcctgcctcagtctctcgagtagctgggactacaggcgcctgccaccatgcccagctaattttttgtatttttagtagagatggggtttcaccatattagccaggacggtctcgatctcctgacctcgtgatccacctgccttggcctcccaaaatgctgggtttacaggcatgagccaccgcacccggcctattttttatttttaatagagacagggtttcaccatgttggccaggctggtctcaaactcccagccccaagtgatccacctgcctaggcctcccaaagtgttgggattataggtgtgagccaccgtacccagccaccttctttaggtcttaaatgtctctctgtgaatcctcttttttttttttttttttttttttttattggagggactggttctttatttcaaaaagacacttgtcaatattcagtatcaaagcaggtggactattgatttctgtttctcccaatcggccccaaagagactatatcaaaggacagtacgttttaagccagtatgctgcaggatgtacacctgacagactttacagaaaccttatcggaaagtggggattgggtagggaaagaaactttaaaagatcagcaaactgccagcccggccaggcacggtggctcacccctgtaatcccagcgctttgggaggctgaagcggacatatcacgaggtcaggagttcgagacctgcctggccaacatggtgaaaccctgtgtctactaaaaatacaaaaaattagccaggtgtggtggtaggtgcctgtaatcccagctactctggagggtgaggcaggagaatcacttgaacctgggaggcaraggttgcagtgagctgagactgcaccactgcactccatcctgggcaacagagcgagagtccatctcaaaaaaaaaaaaaaaatctgccagctcacagactgtagagggctgtcacagtcaaactgggtggccagggtgccacccaaagaagcaaagtttcaaaataatacaaaaatttaaaaaagttttgtacataagctatttaagatttctctagcattaactgatattaagcacaatgagatggcacttttagagacagcagcttcaaacccagaaaagggtaatgagatgagtttcacatggctgaatcagtggcaaaaacataatcttctttctatcctcctctaagaacaccagtgctccctaatgcagtgtgacctcatctaaacttgattacatctgcagaggcctgattcccaagtaaggtcacattcactagtgctgggggttagatcttcttggggacacagttcaacccactacacctggtttcctccagattacctggagaccattttaagattcatggcatgaaagattatggatctaaacttcaaatgtagaattctagatataatctgttcatcttttctttgacgtgaaaagaggtagaagtggcataatttggagtctgattaagattttacagtccgtgcttttttttgccaggagaatcccagagcacgcctttgatacctggaaggtgactactcttttttattttatttttttttgtgagacagagtctcgctttgttgcccaggctggagtgcagtggcacaatctcggttcactacagcctccgctttagcttaggttcaaatgattctcccacctcagcctcccaagtagctgggattacaggctcacaccactgtgccctgctaatttttttgtatttttaatagagatggggtttcaccatgcaggccaggctggtcttgaattcctgacctcaagtgatcctctcgtctctgcctcccaaactgttgggattacaggcgtgagcaaccacgcccagccaagttgactactcttttattttttgagacggagtctcgctctgtcacccaggctggagtgcagtggcacgatctcggctcactgcaacctctgcctcccaggttcaagcgattctcctgcctcagcctcctgagtagctgggattatgggcacacaccaccatgcccggctgatttttgcatttttagtagagacgaggtttcaccatgttggtcaggctggtctcgaactcctgacctcgtgatttgcctgcctcagcctcgcaaagtgctgggattacaggtgtgagccactgtggctggcaaggtgactactcttattgccacctgttgctgcagatttagtattttctggaagtttagagcatttttaggattttcacagtactttttaattatgtctaatttggtgtttttttttttaaagttataaagatgcttcagactgcaaagaatttgttgaaagaggagaaattggtgcatagctatccgtatgactggaggaccaagaaacctgtggttattcgtgccagcaagcagtggtttataaacatcacggatattaagactgcagccaaggtataaaaagcatcctgttttaacaggtcgggcatatcattccctcagtataaaggggctgcatgtgaggttgaggtggggtttcaggagtaatagggattgctgctattatgatttagtttcataacattgtagaattttagatctggaaggaccttggacttccattttttcattatacatgtgtgagaaatgaggcataaagaggttgagtgatttgtccacatcacactgttagtagatagactttcttgcccagtgtagtcaaagttgcatagaatttggacagaactgtgttacctagtttaacctcccactgcctctgtttcctcatctatataaagtggtaataatgcgtatctcatggagtaaggaaattcgagtttccagaatatggtctgatacataataagcagtcagtaaaacttttttaaaccctttgcttccttaagattgaaattacaatcaattaaaaaagttactgttctgcttacaaaggaagcatattaaaaagaaaaactaacaatatgaaaaatatacaaagttgttgctttggagctaacaaatacttataattggtatttaaatacttaatatatatttgagccctttcatttaatatgtatctttctatatgggtatatatatatatatatatatatatgtgtgtgtgtgtgtgtgtgtgtgtgtaaacatctctcacaacttgattctatttaatgaaagagcttaaatatatatgtgttaaccaggttgaatatatagatattttgctttacagkttgaaagatactactgtatttagctggttcatttattggcctggcaatttggggtccttgccaaagctttttatagcagtttatactttctatacttgtgtaatgtggacaactataatatatagtgcattttggttttttcttcatttaaagcctctcttccttatttgtcaatgttaaaatttgtaaattgcagctctgcaccgatttttggttgtagaacatctaagtctgacgcaatatatttaagccaagttttttttttaacttttttgtaaagttaaaaattgttctttgtagaagtagtgagaataggataatgtattgtcgtattcccatcactcagtttcaacaataatcaacttttggttaattttgtttttatctacacccctccgaccacctactttttttttttttttttttttgagacggagtctcgctctgtcgcccaggtcggactgcggactgcagtggcgcaatctcggctcactgcaagctccgcttcccgggttcacgccattctcctgcctcagcctcccgagtagctgggactacaggcgcccgccaccgcgcccggctaattttttgtatttttagtagagacggggtttcaccttgttagccaggatggtctcgatctcctgacctcatgatccacccgcctcggcctcccaaagtgctgggattacaggcgtgagccaccgcgcccggcccgaccacctactttttaccccttaacaattggattattttaaagcaaattccaggcactatttcttccatattatatattgtcccggcgatattttagcacatatatttgaaagataagctctttttttttttttttttttttgaaacagggtcttgctctgtcacccaggctggagtgcagtggtgtgatctcagctcactgcaacctccacctcctggactcaacctatcctcccacgtcagcctcctgagtaactgggactacaggcctgtgccaccacatctggctaatttttgtattttttctagagatagggttttgtcaagttgccccggttggtgtcgaactcctgagctcaagcagtctgcctgcttcggcctctcagagtgctgtaattacaggtgtcagccaaagataaactctgtatttatttatttattttcttgagatggagtttcactcttgttgcccaggctggagtgcagtgatgtgatcttggctcacagcagcctccacctcctgggttcaagcaattccctgcctaagccttctgattagctggaattataggcatgcaccaccatgcccggctaatttttttgtatttttggtagagacggagtttctccatgttggccaggctggtcttgaactcctgagctcgggtgatccgccctcctcagcctcccaaagtgctgggattacagacgtgagccaccatgctcggccaaactctttaaagcataattcccatgccattatcaccacctttaaaaagtaatagttattccttagcaaaatcaaatatctattcaatattcacatttcttagacttttaaaccaagtatggtattaatcaaattgatttgtagagattttgccattctgccaataggtggtgctacagagagctttgtgggaggggacttctggtagttacggtgagtgaggaaaccatttaaaccttctttgaaaatgtaaaaatgcttttattaatggatagaaagattttttaaaatgaagttaacattttgacctttttggagactattagtaaacatttttgctatacagttaatcttttgctagttgacaaattaaatcaaatggtagcagttttcaaccttattttgggaatggaggaagggagctttcttgagaggaagtaactgttagccatttgtcgatagatatatatatatakagagagagagagatttattttagagacaggctcttgctctgtcgcccaggttggagtgcactgccatgctcatagctcactgcaaccttgaactcttgggctcaagtgatcctcccacctcagcctaccaaaatgctgggattacaggtttgaaccacatacttgggcttattttgagaaagtgttttctgtgttgtaaactatattatgtaaaattaggtatatcgcaatctttttttggcagtctacgatagtaatttattttttaagcattttaaaaaatggtggaaatcaagtttgaattgattttaactatagtttagtgaagtataatagttctatgaaagcttttattaccagttttgatctagggttggtgtaaattagaaattggtatgaaatcttttgtaacattgttaaaaaatgcaacaatgctcctgatattatcactgctcccgatattatttattaagttcttcgcggctccatttttactttgccttatttgctctgaaatcttttagttctttagttgtttttttgaggggagggtaagggaggtatgtgaatggctacaaacatccaaaagaaacaaatgcatttggaaaattgactgttctagaatacttgttctgctttctctcacaagacttgatttatgaattaattgcaggaattgttaaaaaaggtgaaatttattcctggatcagcactgaatggcatggttgaaatgatggacaggcggccatattggtgtntatcaaggcaaagagtttggggtgttccaattcctgtgtttcatcataagaccaaggatgaatacttgatcaacaggtagaatgctttctaaaattttttagtgttttaaagtgaaatattttttcttcaaaaattgaaaaataatgtggatgattaagaaccgtttatatatrttaaataaaatatgctaaaatagtcttttgggggactaaaatataagttcaaaacaattctatcatacagttaaaatattaactagattttcttaaatattgatacttagaagtaaagtctctgactttttttctatgagaatttattgggctgtattaaggtatcatggatccaaagatggacagtgtttagcaggggagcctgaaatgtattttttctaaaggaatgaagagaatcactctcacattctgagtctgctttccttttcagtgkaaatgggattatgtaattgkgtagatacttaaaatttaagaaattgtagttaaatgcacatgattacactgatgattatattcccagtttttccctttttttttttttgagttggaaaggtaatagatggacatagtgaacaattcatagtaraaaagcttgtacactgaaaagtaggctttttcctactccaggtatccagaacctttttttgagrcagtcattgtttacagctgtttctgartctttccagaaaaaatgaattcttctgtcagcacatacatatgtttatacaaaagagagtatctctatcttctgctctgtgcctagatttttttcactttatgtgttatgatttattccaaatcactacacatagatcagcctcattcttaagctttattaaagcatactttacatactataaaattcatggccaggtgcggtggctcacgcctgtaatcccagccctttgggaggccgaggctggtgtatcatgaggtcaggagttcaagaccagcctggccaagatggtgaaacyccatctctaccgaaaatacaaaaatkagccaggcatggtggcgcgggcctgtaatctcagctactccgaaggctcaggcagagaactgcttgaacctgggaggcagaggttgcagtgagccaagatcgtgccactggactccagcctgggtgacagagtgagactctatctcaaaaaaattaaaaaagaaaaattcatttattataagtgatttatagtaaatttgttaagttttacagccactatcataattgtgtcttagaataattcttttatcccgaacagctcccttttgtgcttttcgaaagagaagttgcttggaaatctgtgagctttggagaatggcaactgaatttgaacccaggctttgccattcactgtgtgtgagactgaggaatttacttagcctctggctcctctataaaataggaaaagcaatggttgcaggtagactgttatgaatactaaataataaatgcaaactacttggtgtaaagcacagtattccatagatgatgagctattcatgtattcacttaagaaacattgttatgtgggcacagtggctcatgcctgtaatcccagcactttgggaggccaaggcggcaggattgcttgaagccagctgttcaagattacagtgagaccccatctctacagaaaaatttaaaaattagctggtgtggtagtgtgggcctgtagtcccagcgacttgggaggctaaggcgagaggatcgctcaagtccaggagtttgaggttatagtgagctatgatcatgccaatgcactccagcctggatgacagagcaagacactgtctcttcagaacgaaacaaaacagaacacattgtcaagcacttagtacgtgtcagtgctaggaactgctagttgctacagtgaacaagactgacatggcccctgtttttaatgagataatagtctagctagtttatcttctagtaatattagggaggctttgagtgttgttgctgtttttcacagatgtggagaggggaatgttaattcttccttttaggaacacattccagattttcattttctttgagcaatttyttttaatttggtgaatggaattttttctaaattatgctattaagaagtttaaacttttaagtagacttgaggagtaagagtatgttttaggaaaagaaagtagaggctagagactggaaagtcattggaaagctatttcaatattattataagttggatctgaggtaagactttaggaataatctaaatattgttgctgtggtgttcttacagagcttggtcagatgtaaactactaatatcttaatacttacattaagaattaatgtaaattctgtccagttcagattattttattttatttttgatacagtctcactctgtcacccaggctggagtgcagtgatgtgatcttggctcactacaacctccacctcccaggttcaagtgattctccctcctcagcctcctgagtagctgggactacaggcacgcgccactgacttggctaattcttgtatttttagtagagatgggctcttgccacgttgacgaggctggtctcgaactcctggccacaaaggatccatccacctctgcctcccagagtgctgagattacaggcatgagctaccatgcccagcctcagacttagtttaaaagaaaaagaattaaagtgattatacctgagacgagtttccacaaacatttgtttaaaatttcacactggaaagttttttttttttttggaaagttttataagccatgtcattgtctcctcttcttttttttttttttttttttttttgagatggagtttcactcttgtttcctaggctggagtgtagtggcacgatctcagctcactgcaatctccgcctcccaggttcaagtgattctcctgcctcagcctcctgagtagttgggattagaggcatgtgccaccacgcccggctaattttatatatatatattttttagtagagacggggtttctccatgttggtcaggctggtctcaaactcccgacctcaagtgatccgcccgcctcagcctcccaaagtgctgggattacaggcgtgagccactgtgcccggctactcttcttttcactatttagagagcaagatgtctagggaatttcactgaagtgattgargtgggtggggattccttggtggaatarccctctggactctgaggtggatcatatgtatgtattagtaaatatagcaaactggtttaattgatacatcctgataattaaatggtacataggttgactggtcagtaagttaggttaaataaatatgagctttgtcagaaaaacacaagttttcattaggtatatttatgttttatttactcaatacatttacatggtagtgttacagattatcttctgtgtacctgccattgcgttggttgcgtggtgttagtcgatttctgatattgaagtagcacagtcatacagaatattggcctaaagaaatgacagacaaactcagctatattgtctgtcaattcataggtcattttcctgtataccatttctgaatgatgactttaatcctcttccattattggatctttttggtgttacaaaacttgaatttaagaaaattgatattaattcttaatcatttgttaattttataaaacaggctgaaaatctttttttctgctggaatcaaatgagagtccaagtgaccacaattttctgtctttctttattatacctttayattgtagcaagttggtaaccatcaaaagtaacagcatctccactggaaattggtacacagtccacatggagttgctgttacacttgataacaccattaaacatataaggagattccttttgctcatcatgggagctgtacgatatctctaagtatacttgtttcacagaagaaagtctcgatttattcatgttctaaataagtttagggactggtagatttgaaacgctgatgttttattttgatttgaattaatagtgtcatttgcattttagatcatatttgtattttatcaagaaataattccatttctgactttactgtcattggtcattttttgaatctgtgagataatgccattagaatttgggttgaaatctgttactagtcaataaaaacagaagaaataatttttagcataaaaaagataaaatgtagaaacactggctacctgggaaggaaaagaagttggttaaatttctttcatcatttcaaacagttataatcactttcatgctattaatgctatagttaacatagtgaaacttagcccctaacttctggaaattatgagaaatttagtaaaaatagccaaggaatttccaatataatttgagtgttaactttagctacctcaaattttttctcarttaacaataataaaccttttgttcaaaaaatttatgttcattaaataaagaaaaatttcttcaaaatggttttctgtcagctttaaaacataaatctaggattaaactaaaaatagaatttccccttccaaatttcacattgttctagaattaaatttagtaaacaaatgtgaaacatttagcctcttacctcattcttcttccagtaagttacagaagaaaagttgtcttaataatcttcaatatttttgcttataaaggcaaaacacagaagacagtgggatgacagcagtcgtttctttgttgctttagtaatcttaatgctgcttaatgtccataacacgctaaataagcctcattccggttgatatcgaagttcagaatgattggctgatgtcatagttgctcatgctacctagtggattttcactgattgaaacctaagaagggacacgtaatgcatgtgttgagataaggcctttgagtaaagtacaaggttttatgatggatttattgctttatgaagtaaagcattaagatggaagcatatagattacatactggtaagtggtttcacccacttttatcagcagtcgtttatactgatctttgggttataggttaactatgagtttgtgttaagtatacaatgttaaagaaatgaaggtagaattcttaaatttcagacaaattaggaattttcctgcatttttttctgaagaatattaaatatcacaaggaaatagttagaaaattgtttaaaaatttttttaggaaacagaaaattatttaagaaatcttttaagtattatcttggtttcattataaaaaaattccacttctaagtatttacccaaaggaaataggactaatacctcttgtgtgaggatatgtatataagatgtccaatacagttgtttataaaggaacataatgatatacaaaagaagatgtaatttaattagttatagaagaatgaatatgtacctgttaaaaatgtcagcttagctcttaatggttgcctagttccttgtgtatgaaaatcaaatgaacataacttatccagtgtttggattttgttagatgtttgtcacatctctataatgagtgtcttttgagcacttgttcacagttaactttatatacttttttcaaattatctttttagattttgtttgaacattaagtttatctttgtttttatcatcattatacctagctcaagtttgtgggttatatgtctgtttatttttattgcaatttttgttttcaaagctctctgtcacacttttttttttttttttgagttggagtcttgctcttgttccccaggctggagtgcaatggtgggatcttggctaactgcaacctctgcctcccagcttcaagcgattctccttcttcagcctcccaagtagctgggattacaggcttgcgccactatgcctggctgatttttgtatatttagtagagatggggtttcttcatgtaggtcaggctggtctcgaactccccacctcaggtgatccgcccgcctcggcctcccagagtgctgggattataggcgtgaaccaccgcgcccggccttttttttttttgagatggagtctcactctgttgccaggctggagtgcagtggtgcaatctcggctcactgcatcttctgcctcctgggttcaagtgatcctcctgcctcagcaccccccaagtagctgagactatagtcacgcaccaccatacctgggtaatttttgtatttttgtagagaccgggttttgccatgttgcccaggctggtcttgaagtccttagctcaaatgatccacctatctcagccttccaaagtgctaggattacaggtgtgagccaccgtgcccgcccaaaattaatttattcaattgacaaaaattgcttatattatgtacaacatgttttgaaatatgtatgcattgtggaatggctaaatctagctaattaacatgtatttgttgggtttttctttactctcttattttaaaattaactttattgttttaaaaatacaaataatttatctagaatctcataatagaaccgaattatagaacataatgcttactaaagtgcatttagtagactttatttagaacatgatgttttcataattcacaatataaagtaaggaaggaagtcttgctctctaaatattagtgagacttgctctcttaatgagataaagcttcttcccttaaaaatgtttcatgtttcttttggatacattgaacaaatttttcttttgttctgattcatatacttatgtaacaaggaaaaaaatctgaagtatgttgttttatttacagtagcctttttgaaattggatttttaaaaataattgcaggattgcttttcattgatgtagctaatgtgtagttacgttgtttctcgtaagtgtaattaggtaagctaaaagaaaaacaaaaaacctttcctcctcactaagagacttttgtcagtttttttaaaaagttttttaaatttgcaaataaagtatgtataaaacacaaaattacatttcttatattaaaatatgcgctatatctaaattactaatattgttataaaaatgtagcaattaaaatgaattttagactagaggtgtctgactaaacttggtgggattttacggttgctttaataacatgccaacagcaaaactggaatctttctttcttaatgcttttagttatatgctcagtaggttacttgaatgtagttaaataacatttaaaatgtcattgaattttctgatatttaggaatatgaaaaagaacttatttttattttttttaaaatagatgtggggtctttactatgttgcccaggctggtcttgaactcttgggctcaagtgatcctcctgccttggcctcccaaagtgctaggattatagtcatgagccaccgtgccaggccaagaatatgaaaaagagcttagttttattaaagttgaatttaggattctaaaatatggatgtggagctgagtgtggtggctcacaacccataatctcagcattttgggaggctaaggctggaggattgcatgaggccaggcatttgagaccagcctgagcaacaaagcgagattcccatctctagagggggggaaagaaagcagggcatgttggcatgggcctgtagtcccagctactcaggaggctgaggcgggaggattacttgacgcaggagttcaaggcttcaagtgagctatgatcatgccactgcaatccagcttgggccacagagtaacaccttgtctcaaaaaaattaattaattaaaataaaataaaatggatatgtttcatctatagtcataacgttactcactttctttagttattaggactttttcttttaagaataaaaattttcgcctagtcttcgtcactttttccgatgtttatagaaactgaaactcaaaaaatagtatgatttattcctgtcattttccagttaagtccagttagagtctggtctttggacttagtgcttgctgtgtcaacacactaatctcctgagactgcctagttcctcacttcatctctgatacgtagtcttcactctatgcctgggtaaaagagcctttctgccattgcttagcaaactccagagagtaagagtgtgaattcagttacagtgttgtctttatagatgagttagagaggcagaataaagaagtaaaaacagcacaccaaactatgtatgatttaggaaacacaaattcaagccctggttttaactgttacttgcttagcttcataatttaaggaaccctaaggtgcagaacaaatcatttctcaagacccactgtgtatttctgtgaatccaattagcaagtgcttgtaaagtgcttcgaaaaagatatgtggtgtacgtatatacatagttttgtatacatacaaatactctttatcttttatacatacaaatacataaaatactctttatcctaacatttctaccgtatttgctaaattaatatgaaatttgagacatttacttttacttcgatattatttttatgtctttttccaatacatttaaagctgttttactgttttattttactctttacctaaacttgccagtctaatgataacattgtaaaaaaaaaaaggcaaaatgacacccatttttagaattattcttttttaatgagaatttcattagtatgaacagtgttatcaattgtaattgtgcgtatgtgtccatgtaaatgtactttactagtatctctcttttatggttgtaatctttttgttttttttttcttttggtctttagayttattcagatttttctattataccatattcatattttcttaactgaaaatgttctggacaaactatataaaatagtaatatgtaactaaatactattgtcatataactaggtagttattacataaggtttttatggtctgataacataaaagtttatctttactgttaaagtccatctaaaatgattcactgtcttagaaacatgcatttatgcccattttcctttctcattataagttcttcaaagtacatgatggtaacattatacttttaaaatctatccttcatagaataccaacttactgatatccagcttttataaggtatttcaaatttaaatttgtagagcatatttatttatttattattttttttgagacggagtctccctctgtcacccaggctggagtgcagtggcgcgatctcagctcactgcaagctctgcctcccgggttcacgccattctcctgcctcagcctcccaggtagctgggactacaggcgcccgccaccatgcccggctaatttttttgtattttttttagtagagatggggtttcaccgtgttagccaggatggtctcgatctcctgagctcgtgatccrcccgcctcagcctcccaaagtgctgggattacaggcgtgagccactgctcctggcctgtagagcatatttaatttatactcatttgattttgctttccacaacaatttttggtaaacacttcatttatctgtgaattatcaggcccagacctgacgtcaaataatcagtttgaataatgcttacatagtatttattcaaatgtgccaggtattgttctatgtgttttatatttattaactcagttaatattcataggaagtctcttcatgatgctgttactatttgtgttttacaaatgaggaaacaggcacagaaatgttaagtgccttgcctgggttcaagtggtggagccagaaattaagctaaagccccctgctggcaggatccatgctcttggccattatatgtactgtgactaaatgaaaagcaactagaggaagctgtaatagcaacaaagctacaataataaattcaatattctaataaatcaaaaatattttatttttgtgagaaactatagtatgaatttttttccctgagtttaatttttaaataatttattactgtatatcttcctaaagatacgaccagttctgttatttatttgataggggttgattggctttctgtcatgtgttaggtgctgtactaagttttacatgtatagtctcatttagtttgtagttgttctgagggaagtgtctaggattactacaatgttaagtttcaccaggggagggatcttgtgtattttgccaactgctgtatctctagtgcctgtgcccaggacacaggaggtgttcaatagtttctgaacaatgaattagattgttcttaacagaagggaaagctaggtcttaaagaagttttagtacttgtgcatggtcatataaatacaaagtgacagtcagaatataagcctggatatctgtcatcacagtctctgctctaatatggcattgcatcttgtgcagatgcctgtaagcagggagggagtcctggaaagttttcaagcagagaattcgtgtgataaaagcagtttaggaatgcatctatttcaaggtctgttttgtaaagtaaagggatgagggtaggaggaagtactctcagaccattgattgcatcagtttagttttgagggaatgaggttggactgatacagtgtcagtgggaaccactgtaatctttcaaaggtagaactgagagaatgtgttggtttaatttaggcagaaatcagaagagggaagataattagaaggctttgagtataagtacctggatagaaaatagatgagtaagaaataggtaaatcagtaacggaaacagatgttttttctttttaaggatatgtataatcaattttttatttatattgaatttaaaatgatagcagctttttcttcaaactaaggtttgaggaaaaaggaaaataaatcactatttcttaattttaaaatgtttgttattcatcacaatagttaattgaataattctgccatgtcccccctgaaatagccaaaccactgagcatattgttaaactagtggaacaacacggcagtgatatctggtggactcttccccctgaacaacttcttccaaaagaagtcttatctgaggtaaatttctgtttgtatttaacagcctttgtatgtattacaggacttaatgacaacatgagaaattcttgagagttaaaaaattatcttatgtaaagttaacaaatttatttactgtaaattagaagctaatgcagtgtgaaagtagacattttgtttaactatagaagtgtagtatttaaggctgggcgtgatggctcacacctgtaatcctagcactttgaaaggctgaggcagacagatagcttgagtccatgagtttgagaccagcctgggcaatatggcaaaaccctgtctctacaaaaaaatataaaaattagctgagcattgtggcatgcgcctgtagtcccagctacttgggaggttgaggggggaggatggcttgagcctggaagacaggttgcagcgagccaagattgcaccactacactgcagcctgggtgacagagtgagagcccatccctgcaaaacaaagtgtattattaggtcgggcgcagtggtgcacacctgtaatcccagcactttgggaggccgaggcgggcagatcacaaggtcaggagatcgagaccatcctggctaatacagtgaaaccctgcctctactaaaaatacaaaaaaattagctgggtgcgatggtgggcgcctgtagtcccagctactcgggagactgaggcaggagaatggcctgaacccgggaggcggagcttgcagtgagccgagatcgcaccactgcactctagcctgggcaacagagtgaaactctgtctcaaaaaaaaaaaaaaaaagaaaaagaaaaagccacgcaacatacctttagtcccagctactcaggaggccgaggcaggagaatcacttgaacccaggagacggaggttgcagtgagccgagatcgcgccattgcactccaggctgggcaacagagtaagactctgtctcaaaaacaaaacaaatcaaaaagtgtagtatttaataaagtagtggaatgtgagggtcaattgttatctcattgagggccaggattgattgatgttgactgatttggttgactaagctcatgtaatttactgttagagaacagtgcctaatggtacatcaggcctttgtaggatctgtagtagagttagctgattgtatcacacattaaaatatccaaatttaaagttaatttcaaggaaataaaaaccaattcatattacattggtaaatatgtaattcagtggccacagatacttttaaatgtgaatggagggagttgaagttaactgtgaaatgcttaaaaatactgtaaatttcatctaaaaatgtgaacttcatggttgcatttcattttctgaagacttttggggtacagtatytgttgtctatattgtgatctttgtgtacctgacatgcttttgcattatcttactaggttggtggccctgatgccttggaatatgtgccaggtcaggatattttggacatctggtttgatagcggaacttcatggtcttatgttcttccaggtaattcttaaaaatagatatatgccgatcaagaagttttgaaaatatggaattggtatttagaagggatctataatcaaactctttttctgtgtgtgctttatttagagatctgctatattttagacctcgaaagacccttagagtttacttaatccaatgatttctaaacctttttctgtttttctagatgaaatttcatttagaatttataatacagaaaatagttaaacatgggaatatttttcctcctttcaaccagttcattctccttggccacttggcaaccccaaggcacccagttttgtaaaacaaagtttggaagtcactgaaatagtctgaccccataatttttcagaagagaaaatgaaattgacttagagccaaattaggtgatggtcacatagcttagtagtgtcaaactagaacgcaagtaccctgattttcagttctcatcttctatactacattgctttttgtggctttttctcctctctgtacaaacagctgactaactttatacttacagataattagcgaatgtttttgactgattggataaagagaaaggagagacgttgggcaggaattagaaaggagtagtaggagaaggcacatattagaggatgtgtttagatgcttgagaagaaatatttttaaggcaactaagtgaaaagatagagttcaaatgaagaacaaggcttgttatcactgtgaagttggagacagggatgagatgtcacggaggcagtgatggatcacacagttcctcacactcctactaagggccagctttggcctgagagaccctgtttgctttctggagtaagggtatgtgggaaaagtagcttgtctatgaatcacacaataggattcctagtaggtggatctatttccttcatttaagcctttctttcagcttaggaagtttgaaaaacaaaatgcatataaattcatgtttactctctattacaagtaaaatgtgcgtaataataatggccaaatataagttacatatttttataatttttttgtagtgattttcagaattattatttcataatttttctcccagcatattcgagagaaaatactgcaagtttaggtacttggtttccctaaattacagtcatgtgttatataatgacactccagtcagtagcagactgcatatatgatgatggccccacaagatgataatacatctgactcctgaacaacagggttctgactgcacaggtctacttatatgcaatttttttcaatgaaatgcagatggaaaatatagtattctcaggatttgaaacccacatatagaaagggagggccgacttttcatatatgcagtttcagcagggccaactgtgggacttgagtattcacagattttggtacatatgggggtggggggctggggggttggtgggtcctagaaccaatcctctgcatatatcaagggatgactactgtatttttactgtaccttttctgtgtttagatatgttcagatacacaaatacataccatgtgctgacattgcctgcagtattcagtatagtaacatgctgtgcaggtttgtagcctagaagcaaaaacactatgccatgttggctaggtgtagagtaggctctcccattgaggtttgtgtaagtacactctatgatgttcacacagtgatgaaatcacctaaggacacatttctcagagcatatctctattaagcaatgcatgactatgtattgaaaatgcaggtcaataccactacttaaggtagtaggaagaagagtttcctgctggcacattttgggcagcattctgaatttcagaaaagagtatgccaattgtgaaacagtgaggtatagtgtatttcaaagtgtattcactgctttaggctttgtgagaattaatgctgctaccattgttgcttttcartttctgaaatggttttacagtgcagttaagtgcacgttatatttggcgctgtcaagtgggttaaaatccatgaaaactggcattaaaatctatctgatagagtttagtcataatatttctagagtgtgattttttttttttttcgagacagtgtctcactctgttgcccaggatggagtgcagtggtgcgatctcagcttgagttcaagtgactctcctgcctctgcctcctgagtagctgggattacaggcatgtgccaccatgcccagctaatttttgtgtttttagtagagaaggggtttcaccgtgttggccaggctggtctcaaactcctggcctcaagtgatccatctgcctcagctcccaaagtgctgggattacagacgtgagccaccgcacccgtccagagtgtgatattcttaaccaaatgattttcactgcaacagaaaaattttaaattaattcataataattgtacatattattgagtacgtgtagtgttttgataggtgcatttaatatgtaatgatcaaatgagggtatttaagatatctatcatctcaaacatttaccatttctttgtggtgggaacattttatatcttctcttctagttattttgaaatatgcaataaatggttactatatttaccctactgtattaaacactagaatttatcccgtatatgtaactccttttctatcctcattgaccaaactctcttcatccctccctctcacccttcccagcctctggtaactgtcattctactttctacctccataagatcaacttttttagctcccacatatgagtgaaaatatggagtatttgtctttctatgcttggcttatttcatttaccatcatgacctccagttccatccatgttgctgctgatgacagaatttcattcttttttatggctgaatagtattccattgtgtatatttatcacattttctttatccattcatctttgatggatagttagactggttccatatcttggctattgtgagtagtgttgtaataaacatggagatgcaggtatcctgtggatatgctgattttatttcctttgcataaatacctagtagtgggattgctggcttatatggtagttctgtttttagttttttgaaaagaaacctccataatgttttttataatgactgtactaatttacattcccaccaacagtgtataatagttccattctctccacatccttgccatcatttgttactttctttttgataatagccattctgggctaactggggtaagatgatatatcactgtggttttgatttgcacttccctgatgattagtgatgttgaacattttttcatatacctgttgtccattcatatgacatcctttgagaaatgtctgttcagaccctttgcccactttgtaatgaggttttttttgttgtttcttgtttttgctgtttctttatttgaattcctttataatctgaatatcagtttcttgtcagacaaatagtttgcaaagattttcttccattccacaggttgtctcttcactgtgttgtttcctttgtgtgctgcagctttttcttaatatagttccatttgtctattttcgctcctttacttgtgcttttgaagtcttagccataacatttttgcctagaccgatgtcctggaggatttctcctgtgttttcctctagtagtttcatagttgggggccttagatttaagtctctcttttgagttgatttttgtatatggtgagaggtaggggtctattttctttctttctttttttgagacagagtctcgctctgtcgcccaggctggagtgcagtggcacgatcttggctcactgcaagctccgcctcctgggttcacgccattctcctgccccagcctcccgagtagctgggactacaggcacctgccaccacgcctggctaattttttgtatttttagtagrgacggggtttcaccatgttagccaggatggggtaggggtttattttcattcttctgcacatggatagccagtttttccagcaccatttcttaaagagggtgtccttttcccactgtatgttcctggtgcctttgttggaaatcagttggcaataaactggtagatttatttctgggttctctattctgtcccattggtctaagtgtctgtttttataccaacaccatgcgtttttactgtaactttgcagtatattttgaagttgggcagtgtgatgcctccagctttgtgctttttgctcagtattgctttgactatttgggaggcttttgtgtttccttatgaattttaggatgaattttccatatgaatttttctgtttctgtgaagaatatcattggtattttgcatggaattgcattgaatctttatttatttatttatttatttgagacagagtctcgctgtgtcgcccaggctggagtgcagtggcacagtctcggctcactgcaacctccgcctcccgagttctagtgattctcctgcctgagcctccagagtagctgggattatagtcatgtgccaccacactcggttaattttaattaattaattaatttttttgagatggagtttcactcttattgcccaggctggagtgcaatggcgtgacctgggctcactgcaacctccacctctcgggttcaagcgattctcctgcctcagcttcccaagtagctgtgactacaggcatgagccatcacgcccagcaaattttgtatttttagtagagacggggtttctccatgttggtcaggctggactcagaactccccacctcaggcgatctgtccgcctaagcctcccaaagtgctgggattacaggcgtgagccactctgcccagcaatttttatatttttaatagagatggggtttcaccatgttggccaggctggtctcgaactcctgacctcaagggatcagcgctgctcagcctcccaaagtgctgggattacaggcatgagccacgatgcctggccacgttgaattttttttttttttttttttttgagatggagtctcactctgttgcctaggctggagtgcaatggcacgatctcagctcactgcaacccccgcctcctaggttcaagcaattctcctgcctcagcctcccgagtagctgcsactacaggcatccaccaccatgcctggctaattttttgtatttttagtagagacgggtttcaccatgttagccaggatggtctcgatctcctgacctcatgatccacctgccttggcctcccaaagtgttggtattacaggcatgagctaccgcaagtggcctgttgaggatttttgtgtctttgttcaacagagatactggcctgtagttttcttttttgttgtgtctttgcctggttttggtatcagggtaatgctggctttgtacagtgatttaagaagagtttcctcctcttcgatgctctggagtagtttgagcagaattgttgttctttatatatttggtagaattcagcagtaaagccatctggtcctagacttttctttgttgggagattttttgttacttattcagtccggttactccttactgttctatttcttcccggtttaatcttggtaggttgtatgtgtccaggggtttatccatttcctccaggttttcctatgtgttagtgtacatttgtttatagtagtctgtgatgatcctttgtatttctctgttgtctgttgtatgtcacctttctctctcttttttttttttttttttgagatggagtcttgctctgttgcccagactggagtgcagtggcctgatctcatctcactgcaaactccacctcccaggttcaagcagttctctgcctcattcctcccaagtagctggggttacaggtgcccgccaccatgcctggctaatgtttgcgtttttagtagagatggggtttcaccatcttggccaggctggtcttgaactcctgacctcgtgatccacccgcctttgcctcccaaagttctgggattttacaggcgtgagccaccgcacccagccccatgtctcctttttcatttctgattttgtttatttggatcttcttttctattttcttagtctagctaaagatttgttttcactgcatatgcatttaccttcttacattatctcagactttcctggctgcacagactagattaaactctttattttccccttggtaacacccatcacagttatttcttttcttttttttttttgagacagattcttactctgtcgcccaggctagagtgcagtggcacaatctctgcccactgtaacctccacctcccrggttcaagtgattctcctgcttcagcctcccaagtagctgggattacaggcgcccaccaccrtgcccagataattttcgtgtttttagagatggggtttcgccatgttggtcaacctggtctcgaactcctgacctcaggatttgccagcctccacctctcaaagggctggggttacaggcacgagacactgcacccggccccatcacagttatttcttgcttaacataaaatctaccctactaggtgtcagctccaagaaggcagagtccagatttccccagggtctaacacaatgcctgctatataacaagtgctcagtaatattggtgcaattgaattggtttgattcagttatttaaattttgtttccccacctccactcagttaatctttcttacatgaagattacaacactaaattttcagtcttaggacataaggacaaatcataattttacaaataaaagggattatgggggctttgagagttgtgagtttagatttaaaatatagatgtaatctttatcaacgacctcatgttacttttttttgaaaacccttttattttgaaaagtcataaagtatcatgaagaattacagcatgctcttcatctagatttcccaacgttaacattaacattttgctacagttgctttatatatcctatgtatatatatgtagaggaaaagatgcatcttttatctcaatattttagtatatatttccccaaaacatggatagtctcttaacataaccaacacagatatcaaaattagggaattaacattgattccatactgttaactgtctatagaacttattcctaggtggaaagaggaaaaaaaaaaaaggacccaagatctaatctgagatcacatgtcacatttaactgtcatgtctctctagttcttgttctgtgtctttcatgacatttcatgacattgcttgacattcatgcagtacaggtttattttgtagatggtctctctgggtttgtgggatgcattgtcatgattagatccacgttatgcattttaggtaggaatatcacagaaaggatactgtgtttatttcagtacatcatttcagaagtcacgtgatacatctctgtcccattactactggtgatgtgtaactttggtcactttcttggttaaggtggcatctgtcagttttctctattgtaaagttacttcccttcctccccactaattgttattaataagtatcttctttttctattttaattaacttaaatttctgggtttttttttcttttaatacttaattttgaggtcctgaccaaagagcagatttgtacttggaaggaaaagaccagctcgggggttggtttcagtcatccttattaacaagtgtggcagcaaggaagagagcaccttataagtaagtatttatgcctgaaccaacctgctgagtacctgccagtgtgtgaagcactatgctgagtactacagagatgataaggcaccactcttgattgcttacagtgtcctgtaagaatttgaagtaaaaaaagagaaaggaaaaaggagacaacaccaaggtgtcttgtgagtgtgatgcagatcataactctttgaagaaaaagtcagcattgactggagtagttgggggaacttatgtagttctttgttgttgttgtttttttttttttttttgaaaaaggatcgcattcagtcacccaggctggagtgcaatggtgtggtcagagctcgctgcagcctccgtctccttggctcaagcaatcctcctgcttcagcctcctgagtagctgggattacagacatgcaccaccacacctggctaatttttaatttttttttagaggtgcgttctcctcccattgcccatgctggtcccaaactcctggcctgaagcagtcctcctgccttggcctcccaaagtggtaggattataggcgtgagccaccatgcctggcctagaactagatcttgatctatggtaaaacttgactaggaggaatgtagggaaggatattcaaggttgagagaagacagcctgagtgcagatgtcctttatatttgtaatatccacagtggctagtgaactgaaacattgctttcatgaattttattaaattaggtattctcatttagtacacataattactttttcaaacgtgtgggtgaaagtactaatcagaaagattcctaaatagcttagcttaagattgtggctctcttaggataaaaacccatcccagaacatttcacatgtttcttttttttttgagatggagtcttgttctattgcctaggctggagtgcagtggtgcgatcttggctcactgcagcctctgtctcccgggttcaagcgattctcctgcctcagcctctcgagtagctggaattacggagcatgccaccatgcccggctaatttttgtacttttaatagagacgggatttcaccatgttggtgaggctggtctcaaactcctgctctcaagggattcaccctcctgagcctcccaaagtgctgggattacaggcgtgagcccccacgcctggcccttttacatgtttttgtttcttaacatgcgttttaaagaccagtaaaagggcagatcctatttttttcaaattgtcttttgaaaataattttgagatgataatctgctctttttaagacatactttttcctggttttattttttcatttaaaatttttttttttttttttttttagtgagttatatagtttttccgctatcaccacaagaggttttataacatttccaacacactaaaaagttttctcatgcccatttgtgactaatctccactcccaccccagggcccctggcaaccactgatctccttgctgtctctgtagtttgctctttctaacctggttagttttaatgataaaatcagtacatagcagaagctcagaaaataatctgtttagtgatgaaaatatctaaagttttcctttgtgtaagtcgagagttaactgtttgactattgtgatacatgagctaagaatgactttttttgtttgagatggagtcttactctgtctcccaggctggagtgcagtggaacgatctcagctcactgcaatctccgcctcttgggttcaagtgattctcatgcctcagcctcccaagtatctgggactactggcacacaccactatacccagctaatttttgtatttttagtggagacagggtttcaccatgttggccaggctggcctcgagctcctggcctcaagtgatctgcctgccttggcctcccagagtgttgggattacaggcgtgagccactgcacccagccgaatttgacttttaaggaaaggtttcggccgggcagggtggctcatacctgtaattccagcactttgggaggccgagttaggtggatcccctgaggtcaggcgtaggtaggagaatcccttgaacctggaaggcagaggttgcagtgagccgacatcatgccactgcactgcagcctgggcaacaagagtgagactccatctcaaaaaaaaaaaaaaaaaaaagagaagaaaagaaaagaaaaggttttattcataatcagtcaagaaaaatcatatttttgtgtcaaacttagatactctttttaagctgtacctaatcttcaaaaagataattataattgtgtttatcattaaaatagctgatttgtccctttaggacagtgattgttcatggatttacccttggagaaaagggagaaaagatgtccaagtctcttgggaatgtcattcatcctgatgttgtcgttaatggaggacaagtaggtgattctctaaaatgtattttattttcgttttaaggatcttaaattggcagccaaagcccttaatatagttacttcaatgtaaaaatamaaactatcttttatactctcaaataacacatgattgtaatgaagaaggcagaggctgggattgtggtccttttaacttatttcaggcctgactctccagttaggtcccaaaccacgctgtttcttttttaattgtctgagagcctttaaaatgtgtagatccttttgtgattcgtaagcgtgatgattgggttttcgcactattgtgtgaggtgtgcctccctcaaaccttgttacagtgttggcacattgctgtctgaagtgaaaaaagaatatgtaaagtgtgattgtgtagttaaatggaaatgatgaaaaatgagattgcaacttcaaaatgcgcatttcattattatattgttgaaaattatacactttaaagcaggtcctaaatgtacatcaaatctgaggttgctgataatttgggggggtttttggagctgcttttgtgaattaaatcatttgtctgtttttttctattttttaactcctgtagctttttactgcccgcctaacatcctgtaaccgttcattgttttgtgtacagagttgctaggaaatagtgaaaggaaaagcagtccttcctcttcccctcccttattatagagacctccctggcactgctgtgtgtctaaccaccagctgtaatagaggaaacagacatgaccagggaagagattaggtatgagcatttgtgcattgaacaagattgcagagcacgctctttctttttccagttttgtttttagatacagtctaatttgagattgttagcccgcatttcattacagtgctagtatagtttgkacttacattgtgctcaaaaatatctgaataggagctttacctaaaacatttgttcggctaattggaattgaaagccattgtgtttatatatttttttctcaatgaaaaggatcaaagcaaagagcctccgtatggtgctgatgtccttcgctggtgggtagctgattccaatgtcttcaccgaagttgcaattggcccatccgtgctcaatgctgccagagatgatattagcaaggttagaactattattcttcctatttctaaaggacaagtttgtcaaatcattgttttaaaaaatgagacacattttgtttggaactgaaaaaaactgaatgaaaacgagttcttcatttattgtgagattttaagaatctcctgtgttggccaggcatggtggctcatgcctgtaatcccagcacttttggaggcagaggcaggtggatcacgaggtcaggagttcgagactagcctggccaacatagtgaaaccctgtctctactaaaaatacaaaaattagctgggcatggtggcatgcacctgtagtcccagctgttcgggaggctgaggcaggagaatcacttgaacgcaggaggcggaggttgcagtgagccgagatcgcgccactggactccagcctggcgacagagcaagaccttgtctcaaaaaaaacaaaaaactcctgtgtaaatttatttgtttcaaaacattggtagtaataccagtaattttatataatttgtatataatatcctttatattttattaatatataaaatgtaatatagcatagtatagattatattaattttgtatacttttatgtactcaataacctttcacatttttccatgtatctttatttcattgtgaagcaagtgaaataacattattctgacccacacacatgaataaactgggctactgaaaggtgatttgccccaacgtaataaagaaatataatgaaaattcagtcrttaggcgtaaaatccagtggttgttcctataactgggctattggaataagagtttgttgtgtactttttgttttttatttttttacatttgtagtcttatttggaatgataataaaaataccccactaagaaaatgacaagagttagtaataaaataacttttcagtgaaaattgaaggcaccattagatttttttaactgcatattttttcttcctatgaatagcttaggaatacacttcgctttcttttgggaaatgtggctgatttcaacccagaaacagattccatccctgtaaacgatatgtatgtcatagaccagtacatgctacacttactgcaggatttggcaaacaaggtaaatgtaaattaataaacttttggaaactagaaatatcagcactattgtaggttaaaattttagttttatctgagtggaacagaccttgctggaaatagtaactatagcactcttgaagagaaatatgtccagacttcccctcggaccagatttttctctcatgattagctctatttttccaacaagaaggaataaagtggagttatactttatctgcacatgtgctcctcataataaagtacagaaataaccaaaatggactatcctatttgtctcataagatacttactcattttcatatagacttaaataatttctgttttctggctgggtgtggaaactcacacctataaatcctactactttgggaggccgaggtgggaggattgcttgaggccaggtgttcaagaccagcctgggcaacagagcaggaacctatctctagaaaaattttaaaaattagccaggcgtgttagccagtgcatgtagtcccagctccttgggaggctgaggcaggagaatcgcttgagcccatggttttgaggctgcagtgagctgtgattgtgccactgcactccagcctggttgacagagtgagaccctgtcttaaaaaaaaaaaattgtgttttctcataattggaaatgtgtttgcattagtgtacccttaagtcagaggtgtacataccaattttgcccaaatcaaaaataaatgaggcataaatgaaggaacactaatgaattgttggtgacgtccactgtttgctgttgttaaaatggtgtgattttgttatttacaatctcattctttccttaattaatgtcctttcgtagttctcagagtaaaatagtattttctgagtgtagtcaaatgtgttatccagaaatgacatttggaagattcccaggagttcttgcatattgcctgttttgtatttgtctcattgaaacatatttttgaaaggagcatattttgcttgtgatgacttacattttcatttgcctgtctcagcttccaaatttattttggctttgttccctagattaccgaattatacaaacaatatgattttggaaaagttgttcggctgttacggacgttttataccagagagctctctaacttttatttcagtataatcaaagataggtatgtatgactaaatattaaaatgcttaacaatggccaggtgtggtgactcacgcctgtaatcccagcactttgggaggccgrggcgggtggatgacatgaggccaggagttcgagaccagtatggcaaaatacaaaaattagccgggcatggtggcacatgcctgtaatccgagtcactcaggagactgaggcacgagaatcgcttgaacttgggaggcrgaggttgcaatgagcagagattgtgctgctgcactccagcctgggtgacagagcaagatctcgtctcaaaaaataacaacaacaaaacctcaacaagtattttttgagtgtctacttgtgtttggcaaccgtcagggatacagtgatgagcaagatgggcagtgttgtgcagttattaagattgggttccgggccaggcgtggtgcctcacgcctgtaatcccagcactttgggaggccgaggcgggcggatcacgaggtcaggagatcgagaccatcctggctaacacagtgaaaccccgtctctactaaaaatacaaaaaattagctgggcgtggtggcgggtgcctgtagttccagctacttgggaggctgaggcaggagaatggcgtgaacccgggaggcagagcttgcagtgagccgagatcgtgacactgcacttcagcctgggcgacagagcaagactccgtctcaaaaaaaaaaaaaaaaaaagattgggttccggagtcaagtctgagtataaaggtttgacctcccgcttactagctttctgatttggggcaacttattctgtaatctgtttcttcatctgtaaaatgggtataataatacttacctcgtgattgagaaggaaaagcaataatgtgcttaaagctgtgcttgataaagtgttcaaaaaatcatcactactaatatcagacgatgaacataatgcttgttctcaggagttctcaaatcctgaggggaagagagagatatatatgtgcaattatatggtaacagtgtataatattagcagtatccttgtagaagaggccttgatgccaagtcttcatctgttgctccagtgtgcaggtgacggtcctaccttcatggtaatgagtccagtctgaggcgttatcctcagcctgtcagcaccccaaggaccttgcacatagggattataactcctactccttcccttaaaacactaataacattggagtgggtgggagccacatgttaaataccatcaactaacttattcatagtcctttaatacagtagtctagactctagttgtcatccacctgagaaacagaatgagatagcgtagccatgagtgctttcaaggaggtgggtacacctggacggagtaaaattgtaggagagtgtattgtattctttaagtagaagatgattagagccataggattagccactaggaataaactcaacctgaggcaggtcccatctaggtgaccataatgtataaagtattgtcaactgctgaataagttgttcttgttcaggctctattgtgaaaaggaaaatgaccccaaacgacgctcttgtcagactgcattagttgaaattttggatgtaatagttcgttcttttgctcccattcttcctcacctggctgaagaggtgttccagcacataccttatattaaaggtaaggaatacttcatttattctcttaatgagaaatatccctgatcaaggtgcaacttctacttctatctgcttcataaaaggggcacttatccatttacagtgactgctgtgtgacacagtgtgtcttggtcatgtatttgtttctgcacctatttgtagaggagtagggtaaatttcagaattctgtgctttctgaaatgtattagcagcttgacagtgtcgagaaatcaccttttttcttaaatacctttataactgttctgaaatggctggcatggtggctcacacctgtaatcccagcactttgggaggccgaggtgggcagatcacttgaggtcaggagttcaaaattagccaggccaacatggcgaaaccccatctctactaaaaatataaaaattagtggggcatggtggtggcgggtgcctgtagtcccagctacttgggaggctaaggcaggagaattgcttgaactcgggaggtggaagttgcagtgagccaagatcatgccactgtacttcagcctgggtgacagagcaagactgtcaaaaaaaatgttctgaaatatattttaggttgtattaaaacaaaatatagtgcttttagtgagttttatgttagttgttttcttctgattgtattaagtttataaaaattagaaactatagaagtgtaggaagagggggaagtcacttataatgttactcctgatagctgttaatattgggatatttctatttatttttttctaagcatcctttttttctttgagatcttattatatattttctcttttgtttaaatataacaaagattttccaatgctgatataaatgttttgtaaataattaggatggatccataatatttcatcacttgattaccataaataacaattcttatttcccattaatggtaactatttaatggttagagcttcatatacagtttaggatgtttgtaaagcagtttactatttttgttcttctgaagagcccaagagtgttttccgtactgggtggattagtactagttctatctggaaaaagcccgggttggaagaagctgtggagagtgcgtgtgcaatgcgagactcatttcttggaagcatccctggcaaaaatgcagctgagtacaaggttatcactgtgatagaacctggactgctttttgagataatagaggtatgcagcaatatgtaccttttgaaatggtgttagtatcatagagctttgcctgaaatttgcttttaaaatgtgtctaaattaatcaaataacattgggttatgtgtaactttactatgcaattattctattatgttccttttcacatactttttcacttttaaatatcttttaataaattaagcaaagtcatgcacatttaaaaaaaagtgtctaaattaaaaaaaaattaatttagaaattagggtttccgtcttctaatcctgatatcatcactgattcttttgtttcctatttcaccatattcttttccatgtcttgtaaaacgtgttctgtgcatgtaacacatacatattactgtgtagggatagggaaggaatagataaagttctgtttcaaacaaaaggcctcaggactatttagaagacaggggacatataaattgatcgcgatcgtctttgaatgtataaaaaatgggagttttgtattaagggtcaggtttcctgagaatttcatccatctggaccagattcaaaacaaacccaaaaagagtttccatttttattttgtgaaatctggagaaaattcattttctccagcaagttaccacatatatttcaaagcatttatcctatttttatttctagaagggccatcagaattttattcttgggatttttaggggttgattggccagattggcttatagcttaacataatgatgtgatttttctccagtctaaatgcttaagaagagaattggcaatgaatataattttttttccacggggcattttatttgtaaatatatgtattacatccctagaaaaagaatcccaggatttyccctcctgtgtgttttcatcttgcttcttcatggtccatgatgccagctgaggttgtcagtacaatgaaaccaaactggcgggatggaagcagattattttgccatttttctagatctttgctttgcacatcaaatctggggctgatgtctccacacttgtttagcctgcctgtgaggttcacaacaattttcccagctctgtgaccatcagtgatttcaaatttgccaatgtaaccatgcttcatcatcacggtgagaaacaggatgatgactttggagcacggcctaataagcacctggcttttgcctctctttttggcattgttgatgctcttgagagcatcagccaggacattcatgcgcaccattgtggtggtgcagaaagacggtggaagagctattttttaaaagttttattagtgtcagttttctaaaaaacatccatcttattttgtatggtaagctcaatttaaatttttaatgatgtaattagcaagattaagatttgagcttgaaatagctagtaggtataatagatgagattttcccattttaaaatttaaaacttgggaagctgttcattttacaagtgaggaagtgaggactgctgaagctgtgacctagacagggtaacacagcctagtcctggccttttttcctacatactgtgtttcctttgtcttcagtctttctaagtaatgaactgaaaagaagaacagcttgtttggatcaattttattggaaaaaatactttgggattttcaaaaacatgaatgtattttccttaggaatcataccaagtagctgtaagatggagtcctggttctatccattactaattgcataaacttgttaaaaccaaattaatctctttgagtctcttatttctcatgggctttaatttttaaaggaatgtctatgttggttagcttacaaactcactttgaagatcaaaattacagagaaaaatgtgttcatcagacaaattcagtctacttcataagtgttctgcgtattgttcagattgccactatcagtatacattactaaaagctggtacctgttgagatagtattttagcccctcacccaatgatacatgaaaaaaaaaaaaaaaggctttgaggctgacagacctgggcttgacctgcagttccaccacgtatgggttgagaatcttgggcaagttaacctctctttgcttgtttcttcatttgtaaagtgaggataataaacaccatataggttttttttgtgtgtatgtatgtgacaattagaagtaagagacatcttaggatctagcaaagtgaagtgcctggcattctcaataaatactgttgatggaaatatttagttaaaaccttttatgctaattaggattgatacatttagtgatgtttgctcaggatgcaatggtataccagaaggttcctctctaaacgtgagattttatagtgtttctttttataacctcagtttatggtacaaatttaacataaactgtaactttcacatgcttccttccagatgctgcagtctgaagagacttccagcacctctcagttgaatgaattaatgatggcttctgagtcaactttactggctcaggaaccacgagagatgactgcagatgtaatcgagcttaaagggaaattcctcatcaacttagaaggtaagaaggagrtgaaagtaacaagtaacatctggagaattgaataattataggtcatctccaactttccagtggactgggtttattctaaaggtagatatatacttggaatacrtctttctatggaaataataaaaacaattgccaagtttctaagcccgctcttaaaactatcttacctgatgatcttgggaactgagggctagggacagaagagggagagagattttctttctgtcctttgaataaataatggtcactgtatatgaagtttatgttaggctgacttgctcccattcctctttkgtgtccccctgctttgatacttagtaccccagtactggcccagtcctgcccactgttccccagtattgattctaaaatttcctattatgtataccccggattaaaatatttagccattcttgtgaggggttaaggaggaagttttattgagctcattctaacaatggtatctcataagcaagcattttgtcgatatttgttttatagaagattttaaaagtcagtctggttcatcttcattggtagcggtagagttgcattaataaagaaaaataggctgggcacggtggctcatgcctgtaatcccagcattttgggaggccgaggcgggcggatcgtgaggtcaggagattgagaccatcctggctaacacagtgaaaccccgaatctactaaaaatacaaaaaaaattagccaggcgtggcggcgtgtgcctgtagtcccatctgctggggaggctggggtgggagaatggcgtgaaccccggaggcggagcttgcagtgagctgagatcacaccactgcactccagcctgggcgacagagcgagactccgtctcaaaaaaaaaaaaaaaaaaaaaagcaggtatcttatgctgcttgtgtttttcatagcttttgggtaccaggagatgggaagctaacttacaggcatcagttcaaatttgggcttggcagcatagaccgtgtagtaaaagttctggcttaatttactttgtgtaattttttctttcggacggaatttcgcttgtcacccaggctggagtgcaatggcgcaatcttggtttaccgcaacctccgcctcccagattcaagcaattctcttgcctcagcctcccaagtggctgggattacaggcgcctgccaccacacccrgccaatttttgtatttttagtagagatggggtttcaccatgttggccaggctggtcttgaactcctgacctcaggtgatccacccgcctcggcatcccaaaatgctgggattacaggcttgagccaccatgccyggccatgtaatgttcacatactctttgtacaatgactagaaaataacttagttttatatttttatcaatctgaggtctaagagtattaattgtggagatatttttggttccttttgtcccacgagatattttgagtgaggacactgtagttgtcactataatttgacttttaaaaattcttagtcaagtatgtagctggagaggcagtgtcattcatcagaactatacccaaatttaacagctagaaagtctgctctgcctgagtagatgtagaactcggtgacttgggagatgtcagttaatctcagagtcacggggtctctaattcctcagctcccttcaggtgttgagttgtatgatcccattatcttggctatatatgtaatgggacaaatggggaagtgtctgacaagctttaccaaggcaggacaaaagactgaaaaagaagcctctgctaaaccaattaagaaacagtgttacaagttgaatgcctatcagaaatactcttcatgtatttttttataggkggkgatattcgtgaagagtcttcctataaagtaattgtcatgccgactacgaaagaaaaatgcccccgttgttggaagtatacagcggagtcttcagatacactgtgtcctcgatgtgcagaagttgtcagtggaaaatagtattaacagctcactcgagcaagaaccctcctgacagtactggctrgaagtttggatggattatttacaatataggaaagaaagccaagatttaggtaatgagtggatgagtaaatggtggaggatgggagtcaaaatcagaattatagaagaagtatttcctgtaactatrgaaagaattatgtatatatacatgcagaaatatatatgtgtgtgtgtatctgtggatggatatatgtatatctcttcctatatatatccatagtggacttattcagaacatagatatgtattcagcttgtcttcaaatacggccaagcagaaaatgttttatattttataaatcatcttttgactctgtatttaaattctatgatactgaaaataaaggcattctggaaaaatactgactgattttggtgcagaagttttgagtatcaagtaaaagaagtatagttttgaaagggaatggcggaggcctgtttcccttaagaggtgaagggtcatttcattcttcccattagtgaacatcagccttttcagaatagctagtttttggggttggatcagaaagaatataatcaccaaatttgttactcaagaaaggaagaaatctcttaatagttagttatacttatgaatgtttaggaaacaacatgaaagctgaaaatttatttcactaatatacataagaagttcacaacaatgaacagacagaaaatagcagtatatacagaatttcactacttacagtacattacaatagagaaagcattttataaacagttcagtattggattaaaatcttttaaggatggctaattctattcagcaggaatctaacttctagacacccagcaaacccattcctatcagggtgagagagggcttttgctgttgctatagtgtactgtaaaaatatttgttccttataaatgaagtggaccacagcaacttctaaatgaacattatattcagtgtaagtctcatattattaaatttcagatttttgactttttagatcgcaattgtttttaaaaagcaatttaaatgtaacagtgtttactttgaccatagatgaagttttataataaaagtaaaactttttttttctgtttgcaaaagtatgaagcattaagaagcatggtgctatatatctctttatctacatttaccctggcccctctagttctgcatctaaacagaacctgtaatgtagaagttatgattatttgaacactttttgttttccttcagcattatacaatataatttaataagatacaaatgcatatttaatgtttgttaatgaagaaagttgtgtgagggtgggcatatatctaggaaaacactactggttactggcttctcatcaataactacaaagtaccacatacctttgtttcagaaaccacccattctacattaaaatctaattcctttatcatctatggctctttgttattatagaatgtctacataggtatttatttgcctttcttcctatcaatcagatttatttattttaaaagcccttgataagtagtaaaatatttaactgcttttcttaaccatacaagtcagaattagattttaaaattctatgaaaaattttaggataacaaatctaactagagacttaatgatttgtgttaggattctgtgagccatacttcagcttattattgttctcagcaatccccagatttgattgtctgttctaccagagtaagcttaaccagttttattatctaaaatgcttaataagtgccccctccccgccaagtgatgatggaattgaggatttattctttaaaaatacctataactccaagtttctttgactagcctccttaagttcatactactactttcagcgtacttggaaaaatcacaggaagaactaatctcttagaaaacatataacaagtgactgttaacacagagccagatatgtttacaagaattctaggatgtgtgtggctggggcagcggagacccaagcagaggctgggaggttggactagccctttccagtgctgctactctgtaaaatgtatgtctcaatcagactcacaggcccccatcccaaatactcaagacatcttaaccatttatcttgtaagatttcaagtttgatagttacttaacagtaattactaaattttagccagttaaattcttgtttggatgtgctcttttagctcaaaaaacagatttgtttttctttttatatccctgaaggacatactcctcaactttgcatgattactatagttggcttcttaaggggaagtgaagaaacaaacttctgtatcacaatgacttactatgaataataattgtgatccatgacagatacccataattacactgtatggctacattctaaaaatataccacaataaatacttggtatttgtagagctcaaagcactcttttacagagttttggttagtttggttttttcttttttttttttttttcgagacagggtcttgctatattgcccagaatggcctcaaactcctgggctcaagcgatcctcctccagcctcccgagtagctatagtttggttttaatcagtaaatatttatttagcacttggactgctctaggcactatagggtacaaaattagttgtattttatcctctcatcccagctgtgaggtaggtttgctaaagctgtaataccactaagcagttttttcaatactgttcccaaggacagataatattagcaaatcccagaagcatttctaaacacttgtaggaaaaataaagtcggacttaaaatttttagtatctttgccttttttttttttttttttttacataagttttacaagataatacatttttacagtgacctgatgtggatacaactttgcaacttggcaaaaagcaaatcttaacttacattataattaatttgctgcattttacacatctctgattctcaattttggcaagtacaacaggttaagggttctatttagtgtccccttctgatgaatatgatgatcttgaacccattcttcctcctcaagcacggtcatcctcctctgatggcaacagcagaacctctgggaaaggaacctttcggtatccagaactcccaggtggcagcccagtgtgggatttggagcatgacaacaaaggcattttctcaacatttactaaaggagagtggggtgttctatacgctrctgatggggactgtacatgaacacatttaaattgaattacaacaacattttagataggaaatatagaatcttataagaacataatctaaattataaccaattttaaatagcaaagtttaacaataaagctacttaagtgtttgaattagaaataaacagtaaaacatctgtattaattataacagagttgacatttgtttatattttatcttcagtattaaccaaaggagtggaatttagccagggttgcactttttaaaagttgtatatacttttatttattttacaaaaggaaaaaaaaagacatacttttcccataaaattccaggtcttactatgtaaaataaccatgcactacttcatgttataatcataattttagactatttccagtaggtaagtgtcataaagaaggaagagatatggcttccacagcttcaatgaggtgtaaggctagaccatattgcccatgtttttctggtaaaagctcaattactttatttactagtttagctgttgttgcaattggcacttcagtgttttgaaggtcctgggggtcctgcaaatgggacacaaaaataacctattatagacaactaaacaataattgttattgacttaagagttattacataaaaatgcttttctttgtaactaggtgaattaaacttgtcaaattttcttcataactgttattaaccaggcactcaagaaaacatccaatgaccttttgcctgatctcgttctattgtactgaccattgctttcagccaagtacacagtgtgggtggaagtctggcaagcagctccattccttcttttgtctgggtgtggagaagcgcatgagccagcctttgccccgtgagcaccagcagctgagaggcaaggacctctttgtcatgaacctgtagaatggcctgaagataggaacatggagaaataatacagtcagagtgagcagatttgtttattctataggaaaggggttgccagtgaagagattctagttgatttttgaactgtggccatttatcttttgattgtatacaaccaaagataaatccaaatcaaacttagcatttaaacccaaatttctgttccttggttaatttttttttctctcatcacctaatctttcaattcaatgtggctactcagtgtgctgttttcaaacttttggcaaataaaaggagtttcatgtcatgtctatttgaaaccctctaatggcttttttttgttgttttttgagatggagtctcactctgccacccaagctggagtgcagtggtgcaatctcagcttactgcagcctccacctcctgggttcaagcgattctcctgcttcagcctcccaagtagctgggattacaggcacatgccaccacgcccagctaattttttgtattttcagtagagacagggtttcaccatgttgcccaggctggtcttgaactcctgacctcaagtgatccacccaccttggcctcccaaagtgctaggattacaggcgtgagccaccacgcccagcccctctaatggcttctgaatacacttagaataaccatgggctccgagacctaggatagggccatggcccgggccagcctccctgcctcatgccatacttctttattccttgcttactatgtttggtcagccatactggcctttctagtcctggacctagtcattctagtccccacctcagggcctttgtaattcttgtctcaagcactgttcccccagtttctgagtagctggctgctgcttctccttgggggctcggttcaaatgtcaccttctctgaccactctactgtagtggctcctgtttattcatatgatcctgtttctttctttttcaatttaaaaataaatatttttttcctttttagagacggggtctcgctatattgcccagattggtctcgagcttctgggctcaagtgatctgccacctgagccttccaaagtgctgggattacacgtgtgagccacgacacccggccctctttattttcttcatagcacctatcattcaatgcaaaatttagcatgcttttctgctcctaccagcagactatcaagtccatgatgaaggaaccttgtctgttttgtttactgctatatccctgtgcgtagggcaggcctggcacactgtaggaattatttgattataattttatgttttaaaaaatattctattgttctatttttatacctagatgttctaataaaaggaagagcaaaaggcttcattggaaacttaactgattctttattccaactatcaattttataacttgagcccaattaacattcaaagggtcatgattacctcttctcctaagtggtcaactccatagttgtatagttcccccacataatgccttctaacaacatcttcactaacttgaaggtgatgggctaaatccacagctagagctggccaatcttggtctttcccaaaaggagtgggtgtggcctcttctgtgggatctttgacctttgtggctgaatgttgggcctggacagctgcactgacaactttcaataagaacttgaaaatggagaaagagatagagcaatgcattgttactgtttcattttaaaatacctaaaccaagtattgttagcttttctgtcacttatagtggcttttccattaaattgtttagttatcaaaaaaggaacacatcatttaaacaactagctctcaagaatactttgaaattggtcttttttaaatattattattattttttattattatactttaagttctagggtacatgtgcacaacgtgtaggtttgttacatatgtatacatgtgccatgttggtgtgctgcaccccttaagtcatcatttacattaggtatatctcctaatgctatccctcccccttccccccaccccacgacaggccctggtgtgtgatgttccccaccctgtgtccaagtgttctcattgttcaactcccacctatgagtgagaacatgtgctgtttggttttctgtccttgcgatagaaagtagtcattcttttcaaaagccagctagatttttcccttatgtttttttttccaagaaacaaaaacaaaatccaatagctataatttacctgttgtcgtacagaaataaaatttggatccatttccccactaggtaataactgaattgaagttaggtctttgaaaaatgcattttttccctaaaaagaaagagagcaagaaaactgatgagtgtggattattaaggggggagagggagaaagatttgtttaaaacttaataataacttatggttgatttttatttctccttgaacagtaagattttagaataatttttataacaattatctagtatatagtagacagcctttaagatgaaacccagtgatcccctcctcctggtattcgtgtttcctatagtctcctctccttgcatggaggctgatgacttgcttctagcaacagaagcaggtagaggtgatacatgttacttccaagaccacgttccaaaagactgcttcttctgccttgaggcactcatattcactctcacttgttctgcaggaagccaggttccgtgttgtgagctgctgtatggagaggcacatgtggcataactgaatcttgccaacaattgtgcttagaagtgaatcaccctgtccccatcccagttgagctttcagatgcagcaccttaactacagcctcatgagagactaagccagaggcacctagataaggagaacacagattactgacccacaacaactgtgagataataaatatttgttattttcagccaagttttgggatgatttactccgcagtaatagctaagtaatacatatatgtaccctgaatcctttttttttttttttttgagacagagtctcactctgttgcctaggctggagtacagtggtgtgatctcagctcactgcagcctccaccttcctggttcaagcgattctcccacctcagcctcccaagtagctgggactacaggcgtgtactaccacgccaaggctaatttttttgtatttttagtagagacggggttttcaccatattggccaggcaggtctcaaactcctgacctcaggtgatctgcccgcctcagcctcccaaagtgctgggattacaggcatgagccaccgcgcccagcctctgaatccttttaaaaacacttgttgaattgtttaaaaacaccttatttaaaagaacagatgtgtgtctaaagagtaaaaacagaatatcaggaaacaggattttagaagttccttggaaggaaatgtaatacagagcaaagaacattggcctttaagttgaaagacctgggtctagtccaaggctcaccacttccatccaggttgccttgggtaaatgacccacaatcttgggttaccgtttcttcttctgcaagcaggtcatcctaggtatcttccaatgtgccttccatacctaatcatctgtgattctaggtcatctgttgtgactgccaagtagattaaagctactcatcctttagtgataagaaaaaccggacttacagggcaacccatgacattttggacatcactgagagaagtatttaaagatttagcatacactcacaatctgttactcgatagttcccacctggtggtcctagctatagcatctataatagcaccacttattatttactacattccagatgctgctaagtacttcatgttgaatacaaggaacccttacaacaaccatgaggctggcactgctactttctgaatgagaaaactgagagtaagaaaatctaaataattctagttagcaaatggtagcaccgggattgttttcactagccactcaaccatactagctctctgcagatgagtgtcacccagctgtctcaggtagtcttggcatgacatgggttgaaactaaacattattgtgctaatccaattctggatgtgttctggtttcacaaaggccttttctgatgggaatactgagctaggcactttattttggtatttctttctcttttttaacttttaagtactcttatcgcttatattctcaaagatatactaactcattcaaaatctatacttttttttttttttgagacagagtctcactctgtggcccaggctgaagtgcagtggtgtgatcttggctcactgcaacctctgcctcccaggttcaagcgattatcctgcctcagcctcccaagtagctgggagtacaggcacacaccaccatgcctggctagtttttgtgtttttactagtgacagggtttcaccatgttggccaggctggtctcaaactcctgacctcaagtgatctgcccaccttgtcttcccaaagtgctgggattacaggtgtgagccaccatgactgtccgggagtctctcatttaagggtgaaataataaacccactttcccacaagcctaagctgtgttctctaacccagcttctatcagtaaaaagctaagtaataatgttgacgtttttgtctccaacagtttgtcctgtctctcaaaatttgacacctgcgtggggaaggaaaggattttactatccactgcagctaaactgtgaaggttacaatagaatatgtaaaaacatattctactcacaaatttggacttgatcctgcagaggagccaaaaaaaatcttaggtatagaactaatacaattaaacctgtctcttaggaagacagctcttgcagcatgggactggagagagagaaactggaggcagcgtgattaagaaagggctgttgtaatagccgagggaaagatgattatgcctgaactagggttatagtcatggagagaaacggacaggcatgatctatggcagaatttacaagaatgaatttacaatgaagaaaattggcttgaagtaaggaattggtgagataacttcaaagtttctagtttttgccagggcaaaaatgatgacatcgttaataaaataaccaagtcagggaattcagaaggaacagcaaatttaggttaggggcaggatgtgggtattggtttgcagatatattttagatatgaggtgtctgaagtcctataagacactcaaagagagaagttcaaaagaaatgaatgcctcaaactctagggattggtcaggcctagagatatataagagggagaaaatgagtctgtccaggaataatatggagaatgagaagagcagacagctgagagggcaaaactccaaggggagcagtacagaaggtaaataaaaagaacggaatcaagcagggaatgagggagttggaacctcacaccaaattataccagtcacaaaagtactggacagcttctattaaatatgaaaatccatgtgtctgctaagcctgcaa
